United States Patent Application Publication US 2020/0329713 A1 - sequence listing, part 3

SEQ ID NO: 1 - DNA, 6389548 bp, Bacillus thuringiensis (residues 4,259,701-6,389,548 of 6,389,548)
tgaaataagaatgcggtacaccagcttctaatattcgctttaaaacttagatatatttaatatttttttcactactattattaatcaaattatagtattttgtattaaaatcttatgatttaggactaaataacttaattgatcacactatttgactcagaattgtttaccagaaaaacgttatgtaaactttctattttgtcaattagacaaaatagtttatttgctggtaccttatcattagctagaaagagcctactaaaaaaacgtagactcctttaggtatctaaacattacatatatttcaaacgtagattcctctaacgttaacacctgcccaattccagcgttgtttacaaggatatcaaatgtagtatcacctatatatttttgaagagattgatccatcattgaatacaatatattaatgccattaaaagtacttaagtctgcacgaatcgcaaatacggaaccgccatcttttttaattttatccactacactttctgcttcttcttttcttttactatagtgaacaacgactaacgcaccagcccgtgccaaatgtaaggcaatacttcgacctatccccctactagcccctgttactaatgcaattttccccttcaatttattcatctcatcatcccctggtttaaaaaaatctacttagttatatcacaagataccctttgaaatgttgctcactaatttgatatccataaaaccaaaaggcccactcataattataagagtcggccttttcacttcacatattcattagctttacatacagcatccccaactgttatgtactttgtactaagtataataaagactctaaatggtattataggtaaagccaacttaaactaaagttaattcatatacattttgcttagagtctctgcctttaaacagttcgtttaggattctatgcatatattcaataaaatttcagcaatgcctgtatttttcatctttcatatttttctttattagctatgagtatacttaaaaaactaaaaactatttgataatcttttagaatctaactttcttttaatactatttgctatttcttcaatattttcatttagaaagaaatgattaccttcaaaagaatgaaaagtacacgttttacttgtgtatcgttcccattttattacttgatcatatgtagtaaattcatcattttccccattaaatataagaaaatcaatatcacatggttgtgtatttttgtcatgaatatacgtctcaacgattttaaaatctgctcttagaatagggagaaaaatctccattaattcttctgattgcagtaccccagatggtgtacctcccattgcaataacttctcttttaaattgctcattagaaagattatgtcggatattttttattttactatttggatgatttctaccggacaaaacaagaaattcaggcgatacgtttttagaatcttttatttttctggctaattcataggcgatcaaacttcccatgctatgcccgaatagaatgtagggcgaatcatctatctgcataactattttattgtagacatcatttactgcctcttccatactttggtacaagttttcttcaattctatatcctctaccagctagctctatcgggactacctcaatatatggattaaagtgatttttccattttgcgtaactaaacgcagatcccccagcatgtggaaagcaaaaaagtttagtcttctgcattgattttctccttactttcaaatttgtatatattttggcaaattgcataaatgtctttaattattatctcttgcggaaattcatcccttgttgcacaagcagataacttataatttggatcaatgttatattgtttaaagtaaaagtttttaggtatattcttgtatgaaattaaagttcgtgattctttttttatagagaatgaatttaatggggtataaagcccttttccaatcgtttttatatagctttcttttaatgtccataaatcaaaaaaacaattaatttgttcatcagaattcatattagatatatcataaaattcatccgctgaaaaaaattcttttgctaatttaagagcctctatctctgaagtcttttctatatcaatacccacattaaaattagcagtagtacaaaccacccattctcctgaatgtgacagattaaaatgaaagtcagaaaaattttcaacaaaaggttttccatactcattatatttaaatctaatttcttcattattaattttatacttttggcagattagagatcggattagtaaatcccctatcagggtcctattaacgtcacatgagtttaataaacgcttcattcgttctttcttctcatttgaaaccaagttactaagttgcttaaacaaatgactttcaatattctttggtattttcacagcttgaatgtgtatgataaatcacttcctttttttaaagatggcttcatatatgtgcgttacataaattcaaattaactttattaaattgcaaatacaatagaaaaggtgcatatttacatatcaatgaaaatatacacctttcctcaataatatcatcaaagcattagtttctattacaaaaaatagagaggatttacatcattctatgagcaactcatataggtttctatgtctctatcaagtaaattttccattatcctcttaaaaattaatactcttgatatattcattattgcctacactttatttgcagttattggtctccccttttcattcatagcgttgcatcttttgcactctctacttttcagttaatgaaagggatgtttcttttatcccttcaaattcatttaataggtacttaactatcttttcaactgcggggaagtctactatttcctcatgtgatccagggactgaatacctatttactcttccttttaataaaggtccccaatctgtaaacaactcttttccttcctcagcactaaagtagataacttctccaaagtatggtatcaaatcattctctgccattaagttcaggcatttcctatgagcattgataacttgcttcaaattcataagatttgcatcaggcgggagtactccttccataattaatcgctccacaagcatatcttgcttatgaacgagcccttcttcctgctcagtaagatctctaggaatgaaatgttcagatatatatgagagcatatcctcccttgttttacgatcttgctctgaaggtactttagtatccattagtatcaacaactcaacttcctcaccttgattctttagcacagttgcgatttcataagcaattgcaccgcctaaagaccatcctccaagacgatatgggccttctggctgaacacgtttgatttcttcaatgtaaagttgaattagttccggcaaggtcaattcatcaatttcttccttttctataagaggattctgtaaaccataaaatgaacaatggttcttaagtaatcttgctagttgaatgtaacagaatacattccccataaacggatgaacacagaagaaagggcttttttctgattcttgtagtggaactagcgctgctactgatttcgtcatatcatgcttatcacgaataaggcatgcgattccttccaatgttggattcttaatcaatgttgaaaccttaatctcttttccaaacttctccctaatttttgaaactaatttaattacaaggagagagtgtcctcctctattaaagaaatcatcatttacatagacatcttctatctgtaacacatcctgccagattttaatcaactgatattcaatttcatcccttggaatgattggtgtagagaagttattttctctatgaatagttaaattgttcaatgcctttcgatcaactttgccattcgttgtaagaggaatctcgtctaccttaataaagtgtgcgggaaccatataatttggtacttgtgtcttgagatactcacgccactcatgcatactaccatctccaactacataagcaaccaatctctgctctcctaatttatcctctgttgccaaaactactgcttcttttaccaatggatgcctctctatactcgcttcaatctcttcaagttcaatacgaaagcccctaattttcacttgattatcaattcttctcaagtaatctaaattaccatcaggtaaataacgaaccaaatctcccgtacgatataaacgctcttcttcattaaatggatgacagatgaatcgctctgctgttaattctgggcgattcaagtattctctcgctatacctgcacccccaatatatagctcacctgttacaccaactggaacaggtaacaaatttttatccaatacataagtttgaacgttcggcaatggacgtccaattgttactctcttactatcttttttgatatgatagcatgttgcatcaaccgtacattctgtaggaccgtatacgttataaaaatcaatcttttcagtctctactagctgttcccataatgacggcatgattgcttcaccaccgaccaatatcttgcttggtacatgaacatcagcacttatttctagcaatcctccatctattagtaattgaagtaatgaaggtgtcatatcaaacatttccaatttattctccctaatataggacacaaattgttctgggttagtgcgaacttcacttggaataatatataaacttgaaccataaagcagcatttgtaattgctgaatagatacatcaaaggcaattgatgcattcaaaccgacgcgcatattactaggtatctcatgtgagaaaacttctttttgtaaaccatatgataggtttattacagaatggtgctgtactaaagctccctttggattccctgtcgaaccagaagtgtagataacatacgctaagttttcccctgttacctcacatattggtgaaagtttgctttcttgagaaagcattgcttggtccctatctaggcaaactgtcttaatgtctttaggaatccagcctagtaatacttcatttgtaactaacactttaattcctgtgtcttctaaaatatattgtaggcggctttccggattcgatggatctaatggaacataggctgctccagccttccaaattcccatgagaccaacaaccatctcaactgaacgctcaaagcaaaggccaactaatgactctgtcccaattccacatttctgtaaatgatgggctaattgattagctctttcattcagctctcgatatgttagttgctgtttttcatctaccactgccaacgcgtcaggcgtacgatttacttgctcttcgaatagttgatgaattgcattctcacgtggataggatatagtattattattccattcttccaatagctttctttgttcagcttccgtaatatatactagctccgatagattttgatcaatgtttttgagcatttgcattaacactttgtgtaaatgacccagcattcgttcaatggttactctattaaacttactacggtcatacattaactttaacgataactggattcctggaactacagctaaccctaatgggtagtgggtttgttctaccccttccaattcaccaatttccagattttctgaagactcctctttcactggataattttcaaacacatataaactattgaacagcggtattcctctaggaacttcactccacccctgaatctctgtcaaagaagcatactcatattgtcttctttctatctctccctcttgtatcttctgcaaccaatctattaattttatatcatccatcaattgaattcgcgtcggtgacgttgtaatgaaaggacctacgatgttttcaacatcaataatctccgtagaacgtcctgagcttgttacaccaaaaacaatgtcattttctccactatatcggctcatgagatatgcccatgcaccttgaattactgtactcaaagtaagtttattgcgtttcgcccatccttgtaacgcttgagtctgctcttctgataaatacgtaaccttctctgtgtaacctttttcttcctctttactttctaagcccagcaaagttggcgcagtaaaaccttttagcttctctctccagaattgttccgcctgctccttatcttgctctcttaaccattggatatatttcttatatggtgaggacttaggtaacttcacagcttctccattcattctcttctgatagactgtaagtaattcattaaatactaatggtaaactccatccatccagtaaaatatggtgatgggtccaaacaatccgatattcttcctcaccttcttgaatgactgttacccgcatcaatggtgcttcatcaaattggaaggcttgttttcgatctaatgccaaaaagacttttcttttttcctctatctcttcacttgtcattgtacgccagtcttctttattcactttaaatgggatattttcatacaccacttgtacaggttcttcaatttcgtcccatacaaatcctgtacgaaaaatttcatgccgctgaattacagatttccacgcctgctcaaatgtaggaatattcatttttcctcgaatcataaaactcaattgcactatatacggtgcaacatgttcatccccttggtcatgcaatgtgtggaaaatcataccttcttgcaaaggtgatagtggatataaatcagtaatctgattgttctttccgcgatgcattttgtttagtacatttgtcaaaccttcttggctaagattagccattgcaaaatccgaaatggtcagtgcagattctctatctgaaaattgaatcaatgtactcagttgatatagcatattctgtgcaatactttgaatcgttgatttggaaaattgtccaacattgtatacccaagtgaactgaagttttccatccgttacaaccccaattacatcaattacatgcgatcgcttggaaccggcagcatgatctaaacgcttaaattcgttctccggaataaacattgcatcgctagaaaacatttggtcaaattgtccaagatagttaaaactaatagacggtgtatattgggagcttaattgctcacacattgttgcgttcatgtaacgcaacaccccataatcaacacccttattaggaattttgcgaacttgttctttaactgcttttaatgcttcaattggcgtattagcactagtaatatttaaatgaactgggtaaatacttgtaaaccatcccacagttctcgataaatcaacatcttcaataatctcttctcgaccatgtccctctaaatctacgctcaatatcggctgccccgtacatgctgccgtagcttgtactaatgctgctaataatacttcattgatttggacacggtgagtgcttaaagtctcttgcaataacatacgggtctcattctcatttaacaccacagtaatttcctcagttactgcgcttactggattacttatagtaccatctaccggcaatttaactacgtcttgttcagcctgctcctcccagtaatgtagcacttcttttgataggccagtttcagcgtaatgatgtaatttctccgaccattctttaaaagatgtactcttcataggtaattgaattttctgcccttggactacttgcgtatatgctgtttgcaaatcttccaataaaattcgccaagaaacaccatccacggctaaatgatgaattgtccaaaataatcggccagcgtgctcaccttcatcaaaatacaccattctcattagcggaccatcatgtaaattcaaactttcttgtgcaatattaatctctttttgaataacctgatgccaattagcttccggcacttcgtctaatgaaatgacagtaagcatcaattgttcttctattccttcattccactgtttccaaaccccattaggtaaacgttcatatcttaaacgcagagcatcatgatgaagtagaaggttacctgccgccttttccagtgatcctatgtccaatttctctttcgttctaaagaacatggattgattccaatgatgtgggttaggatgattttgtgcaaaaaacctttgctgaataggtgtaagtatcgtctctccagttataattccctgttcagcttgtacaccttgttcttctttgactacttgcgccaactcagcaattgtttggtgttcaaatatttgttttggtgtcaattgtaaaccaacttgcttcgcgcgcgagacaatctgaatgctaagaattgaatctccaccaatttcaaagaagttatcattcataccaatacgttttgaacctagcacacgttcccaaatgatagaaagcttatgttcacgttcatttcttggggccacgtatccttcttgtgttccttgataatctggtataggtaacgatttccgatcaatctttccatttatggttagcggtaattctttcatttcgacaaagtaggaaggtatcatatggattggcagttttgttttaagatactctcgccattcttctaaactgccttcgcccactacataagctaccagcctcttatctcccgactgattttccctaaccattacaactgcctcttttactaagtcatgctcttgtaaagtcgactcaatctctccaagttcaattcgaaatcctctaatcttcacttgattatccattcttcctaagtagtctatattaccatcaggaagatatctcacaagatcacctgttctatataacctctcgccttctttgaatggatgagaaataaatcgttcggatgttaactctggacgattcaagtacccccttgctagacctgctcctccgatataaagttcccccattacaccaactggaactggcaacctatttctatctaatacataagtttggatgttaggcaatggacgtccaattgttactctcttactatctttcttgatatgatagcatgttgcatcaaccgtacattctgtaggaccatatacattataaaactggattttatcagtctctactagctgttcccataatgacggcataattgcttcaccaccaaccagtaccttacttggaacatgaacgccatcgcacgtttctaacaatccgacatctataagtaattgaagcaatgaaggtgttatatcaaagatttctaacttgttctccctaatataagctacaaactgctccggatcacttcgtacttcgcttggaataatatacaaacttgaaccataaagcagcatttgtaattgctgaatagatgcatcaaaggcaattgacgcatttaaaccgacatgcatgttagatggtatctcatcttcgaaaacctctttttgtaaaccatgcgacaagtttattacagaatgatgctgtatcaagacaccctttgggttccctgtcgatcccgaagtatagataacatacgctaggttttctcctgttacttcacattttggtgaaagaatgctttcttgcgaaatcattgtttgatccctatctagacaaactatcttgatttctttaggtatccaatctttcaatgactcgttcgtaactaatacttgaattccagtgtcctccaaaatatatcgtaggcgactttctggatatgatgggtctaatggaacataggctgctccagccttccaaatccccataatactaacaaccatctcaattgaacgctcaaagcaaagtccaaccaatgattcattcccaattccgcattgctgaagatagtgggccaattgattagctttttcattcagctctcgatacgttaactgctgtttttcatctaccactgctaccgcatcaggtgtacgatttacttgctcttcaaacagctgatgaattgtactttcctgtggatatgctacagcaccattattccactcttccaactgtttttgctgtaatcctgataatataggcaacttagctaatgatttatcaggattctccacgattacattcaaccagttcccaaaatgttcagccatggattcaatagttaagctgtcaaataaatcagttctataaacaaaagtaagtaataaaccctcttccacttctgcagcagttaaacttaaatcaaacttagcgatcggagcattactttccattacttctatatttcttccatgtaattctggtagcttctgtcccgtattttgcaaagtaaacatggtttgaaaaatcggagaatggcttgtatttcgttcaggttggataacctctacaattttctcaaacggaacatcttgatactcatacgccttcaatgcttttatccgtacttgagataacaactcttgaaatgccggtgcattacttaaatcagctcgataaaccaaagtgttgacaaagaaaccaatcagcccctcaatttctcgataatttcgatttgcaattgggctaccaacaataatatccgtttgtcccgtataacgagcaaggaaactttgatacgatgccaataaggtcatgaaaagtgtggccccttcttgacgacttagttcgtttaatttatccagtaatgagcgtgacaacaaaacattatgagttaatccatgatgggtttgcactggcggacgcggacgatccattggcaacattaagactggtaactcaccagataattcttccttccaatatgcaagctgttgatatagtacttcatctttcaaccagtctctttgccactgagcaaaatcggcatattgaactggtagtggttccagctctgcttgtttttcaccaatcgcattctcataaaatgccatccattcttgaagcaagatttccatcgaccacccatccgagataatatgatgcatattacacagaagaacccattcttcttctgaaattcttatgagtttcccacggaataatggcccttgttctaaatcaaatggagattcgacttcagtttgaatccattgctccagctttctttctcgctcctctaatgaaagcttagttaagtccatttgcagaagcggacggaaaacgtacggttgaatctgctgcacaggatggccatcctcttcataaaatacagtccgcaaagattcatgacgctctatcaactgattccatcccaattccaatgcttcaggtaaccaattccctgtaaggcggcatgccattggcatattataaagggcactattaggtgcaaattgatcaataaaccataagcgctgttgggcataagatagtggaatattatttccacgttccatcggcaccaatggtggaatttctcgtttttcattccccttacgtaactgatccattcgtttcgctaatgcctcgatcgttgaatattcgaacagttcacgtactggcaatttgatttgaaagacttcctgtaagcgcgagaccacttgtgtagcaagtagagagtgaccaccaagctcaaagaaagaatcctgaacaccaatgtctcctattcctagcacttgactccacactgaagcgataagttcttccagcggagttcttgggtatacagtattttcagcggattgttcactaagtataggcaatgccttcaaatcaagttttccattcggtgtaagtggtaaaaattccatctcaataaagtttgttggaaccatgtaatttggtaaatgtgtttgtagatgttctcgccattcatggacacttccttcaccaactacataagctactaatctcttatcaccttgattatcctctcgtaccaatacaactgcttctttcacagaagaatgtgcctgcaaaacagcttctatttctcccaattcaatccggaaaccacgaatttttacttggtcatctatacgtccatggaactggagattaccatcagaaagataacttgctttgtctcctgtataatagagacgttctcctgacttgaaaggatgtggaataaatttttcctttgtaagatccggacgattagcatatccacgtgcaagactcttccctccaatatagagatctccaattacgccaattggtactagctgaagatgagaatctaacacataaacttctgtatttgcaatcggtcgaccaatcgatggcgtacctgttgtcactcctacaggtacataacaatctgtggtaacaacggtattttccgatggaccatactgattaattaccgcaaaaggaatatcgttagatgggtactgcgttaattgatccccaccagtaatgataaaacgaagatccgttttatctggccaagataatttcaagagcctttccagaataggcgtaggtgcaaagctagctgttattcgtgaatcaatgagccagtcccttagtgcttctggattaattctcagttcctctgttgacaagtagagtgctgcgccagcagttagatacggccaaatctcctgcacagccgaatcaaaagcaacccctgcaatctgagtcgcacgatcctctgctgaaatatgataaacttcctgatgccaagaaaccatattcattaatgagcgatattcaaccatgacacccttcggttttcctgtagaaccagaggtataaacaatataggctaagttctctggatttatttgacgtgtaggtgcgattacgctttccaccgttaattcttctaacctcaccatttcgacgtgtgcgaaatggccttcttgtccttccgccgtcactacaaattgaatccctgcatcttcaatcatgtattctaaccttgattttggatacaacggatctaaaacgacataagctccaccagcttttaaaatgcctagtaaacttaccattagctcagctgacctcggaagataaacccctaccactgactctggggctactccctttcgctgtaaaacatttgccaactgatttgcttgtgtatccagttcaccataagtccactgttttgtttgatcaactatcgcaatcgcatcaggacgccttgctacttgctcctcaaatttgtcgcaaataagaccctgatgagacatttctattacagtgtcattccatgtttctaataacaaagtacgctcgggttctgatagcatgctcagatcatgcaacggattttgtgggcgatgagaaacttcatgtagccatttctcaaagtgtcctgccatccgttcaatagtagtagcattgaataaatccttattgtactcaaaagtaaaaagtaatccctcttccgtctcaactgccattacacttaaatcaaactttgcaattggactatggctttctatcatttcaatacttctactagataacaccggtaacccttgtttcatattttgcaagatgaacatagtctggaaaattggcgaatgacttgtacttcgctccggttgcacaacttctacaattttttcaaatggaatatcttgatattcatacgccttcaatgccttttgacgaacctgatacagtacatcttgaaatgtcggtctaccactcaaattagctcgataaaccagcgtgttaacgaagaaaccaattagtccttcaatttctctataattccgattcgcaattgggcttccgaccagaatatcttcttgtcccgtataacgagatagaaagctttgatatgcagctaaaagcgtcatgaagagcgtagccccttcttttcgactaagttcattcaatttatcatgtagcgtgcttggcagaaccatagtgtatgtcgacccgtgatgagtttgtattgcgggacgcgggcgatccacaggaagttggagtacaggaagctccccagacaattcttccctccaatattggagttgttgatcaagcacctcctcctttaaccatcctttttgccactgagcaaagtcggcatattgaaccggtaatggttcaagttccgctacctttccatccgttgctttctcataaaatgccatccattcttcaagtaggattcccattgaccatccatctgaaatgatatgatgtagagtacaaaggagtatccattcttcctctcccacgtgcaaaatacttgtcctgattaatggaccctctgttaaatcaaatggtacttctgtttcttgttgaattaaacgtttaacttcttcttcttgatcttcagaagaaagcatagttaaatccgttttcggaattgattgaaaagcatacggttcaatttgctgtacgggttgactattcacctcttgaaagaccgtccgcagtgattcatgacgttctattagttgattccatcccgtttccaatgcttcaagtagccaattccctgtaagacggcataccattggcatattgtaaagggcactattaggtgtaaattgatcaataaaccataaacgttgttgggcataagatagtggaatagcatctcctcgtttcattggtattagtggcggaatctctcgttttttatctcctttacgtaactgttctaatcgctttgccagtgactccaccgttgtatattcaaatagttcacgtactggtaattcgatttgaaaaattctctgtaaacgtgacactacttgagtagctagtagtgaatgaccaccgatttcaaaaaaggaatcctgaacactaatattttttattcctaacacttggctccaaacggaaacgatgagctcctccactggtgttcgtgatgaagtaatatcttcacttatgaactgttcttctaattccaataatgctttccgattcactttaccatttggagtgagtggcataccttcaatttggaaaaagtatgccggaaccatataatgtggtaattgcttcttgagatattcacgccattctccagcatccccttcacccactacataagctactaactgcttatctcctggtcgttcttcctttaccaacacgactgcctcttttacagatgcgtgatcatgtaaagctgcttcaatttctcccaattcaattcggaatcctctaattttaacttggttatctattcttccaatatattctaagttacgatcattcatatatctcaccaagtcacccgttcgatataatcgttccccgtccttaaaaggatgcggaataaaacgttcagcagttaaatccggtcgattgaagtagccacgtgccaatcctactcctccaaggtaaagttcccctgccacaccaatcgggaccacttgttgatattgatctaacacatacaactctgtattatcaatcggacgaccaatcggaataagcattgcttctttttctaaatcacaatcgtaataagtcacatccacagtcgcttcagtaggaccatacaagttaattaactttgtttgctgaacattgtaaaagatccccttaaaccggcgaacctgctcagtgtttaacgcttctccactagtaaaaacttgaattaaagacgatacatcccttttcgaattatatagttccatataatctaagaaagtagataacatcgacggaacaaagtgcatggtggacacgcgatatcgttcaatatactcctcaatcaccgcaggatctttctctcctcctggtggaagtaaacaaacacgtgctcctacaaatgaccaccaaaataattcccatacagaaacatcaaatgaaaacggtgtcttttgtaggattgtatcctcctcggacaatgggtattttctctgcatccactgtaggcggttgataacggaatgatgttcaatcattaccccctttggatttcccgtcgaacccgaagtgtatataatataggctaagttatttgctgttactccacttaccggagctaaattactctctttagaaatcatcacttgatcccggtctaaacaaattgcttgaatatctttaggtaaccagtcctgtagtgcctcttttgttaacagcgcttgaatttgtgaattctccaaaatatatctcaggcggttttcaggataacttgggtccagtgggacataagccccacctgccttcaaaatcccaaagagaccgataatcatatcaggagaacgttcaatacatataccaaccaatgattcaggtccgatacctcgtttttgtagaaaatgtgccaattgattcgatttttcatttagttcttgatacgttagctttccaccctcataaactaccgccactgcatcaggcgtccgtgcaacttgctgctcaaatagctcatgaatcatacaatcatgaccataaactacgtccgtatcattccattcttctaggagttgattttgctcagtatccgatagcattgacagctttgtatatgattcatctggatgatacgtgatttcatttagccagttctcaaaatgtcctgccatacgtgcaatggtactactatcaaataaatccgtgttgtattcaaatgagacgaatagaccttcttccacttcataggcagttaagctcaaatcaaatttagcaatagacatattactttctaccatttcaatacttctatcaggcaaatctagtcgttcttgttttatattctgtagcgtaaacatggtctgaaatataggggaatgactcatgcttcgttcaggttgcacagcttctaccactttttcaaatggtatatcttgatattcgtaagcttttaacgcctttttctttgtttggttcaaaatctcccgaaaagtaggggtgccactcaaatctgatcgataaaccaacgtattaacaaagaaaccaattaatccttctactcccttatggttccgatttgcaatcgggctaccaactagaatatctttttgtcccgtataacgagcaagaaagctctggtatgcggccattaaagtcataaataaagtagatccttcttgtcgacttatatccttcaattgactgagcaatttataaggaaaaatcacatgatgcgcagccccagagtaagtctgcttaaccggtcgaggtcgatccactggcagttgtaagataggaagctcaccagacaattcttcctgccaatacgtaagctgacgatttagcacatcaccttgcaaccaccccttttgccacttcgcaaagtctgcatattgaatagataatgaacttaatttagcaggatttccgcccgtttcttcttcatagaaagcaaggaattcattcatgaatataccaatggaccaagcatcagaaataatatgatgcatcgtacacagtaataaccattcatccttctctaattgaacaagctgattacgaattaaaggaccattcattaaatcaaatggttcttgcgcttctctcgcaattaaactatctacctctttttcttttacttctagaggaagttgagagtaatcccttacaggtaatgctctaggaaggaattcgacaatttgttgcacaggctgttctcctatttctttaaaaacagttcgtaatgattcatgacgttcaatgagtcgattgaatcccttctctaatgcttcaggtatccaatttccttttagatgccatacggttggaatattatataaagaactgtttgggttaaatctgtccataaaccacaaacgttgttgtgcataagacaacgggagtgcttctttattctcctttttttgcatttgcttctgaagccatgctctcttctcaggagaaagtgaactcagctttgcaagtaaatcacttctcatttttttaccccttcctcaatcaaattactctcaaatatcccttgtgcttcttcctctgataactcttctaattgcttaagcagttccagtaattcttcatcattactcacttctgcttctttttgaatataatcttgaaggcttatattctccttactatcattctgcatttcttgatttttgttatcgagcaattgatcaatctgttctgccaattgctgcaccgtatgaaacataaataaatcatgcaatgatatctcgattccaaaagcctctttaagattggaaacagcttgcgtagcaagtaatgaatgtccaccaatttcaaaaaacgaatcttgaattccgatgttttccatgcctaaaacttcatgccatatcgaaacaattgttttttccgtagacgtacgaggagcaatataacaactcgctatctcctgcttctctggtgctggtaaagccttcctatcaatttttccattaggagtgagtggaaatgcatttaatccaacaaaataggatggaatcatataatttggtagttggtccttgagataatcacgccacttttgagcacccccgtctcctacaacataggcaatcaaacgtggatcgccaggataatcttcccgcaccatcacaatagcttcgttaactaatgtatgcttttgtaataccgcttcgatttctcctagttcaatccggaacccacgaattttcacctgatgatcaattcgtccaacatactccaaatttccatccggcaaataccttactagatctccagtccggtatactcgctcgtcttctttaaacggatgcggtataaatcgatttttcgttaagtcagggcgttttaaatatccacgtgctaaccctgatccaccaatgtacaactcaccaactacaccaattggaaccattttttgttcagcactcaatacatatacttctgtattgaagattggtttaccaattggtggtaccctatgcatgacacccttttctaattccatatacgtggaatacgtagtatcttcagacggtccatataagttgaacaccttctcaatcgtacttctctcgtataaatcttgaacaagcggatatggtaacggttctccagccaaattcattacctttactgaagaaggaattgtttttgctcgaaccagttcctttgctgccgatggcacagtattaaccaaagtcacacctttggtagacaacttgtctagatgtagagcattttcagcgacaatcaccttaccacccatcgttaagggaacaaatacttcaaaaacagataaatcaaaagatagtgaagttgaagctaatactcccgctaattcctttcgagaatacgtatgatgcgcccaatgaatcattgttactgtattcctgtgctcaatcattactccctttggatttcccgtggaacctgaagtatagataatataggctaagttatcacccgtcacttcactcgtgcataccgtagtaacttcttgttctatttctgctcgattacgatcaatacaaatgacgttaacgaatgtaggtataaccattttttgttgtaacttttcctgtgtcaccagtacctttatttgagcatcttctaaaatgtactgcagtcgactttccggatacgctggatcaattgggacatatgctcctcccgccttcataattcctaagagaccgacaatcatctcggatgaacgtgtaacgcaaatcccaaccaatgtttcgcatgttacaccatttttttgtaaataatgtgccaactgattcgagcgttcgtccaactctcgatatgttagttcttcatcttcgcacactactgcaattgcttctggtgtttttttcacttgttcttcaaacattgtatgaatcgtactatcttctatatctataacggctgattcattccattcctctagtagttgcttatattccactttcgataacatattcaattctgataataaacattttggataagaggcaatttgatttaaccaatgttcaaaatgatttaccatacgtttaatggttgtatcattaaacaaatcagtattatattcaaaggttagtgataatccttcttccgtctcagaagcaaataaactcaaatcaaatttggcaacagaaacatagctttccatgagttccatttgtctttcggatagctgaagaaactcttgtttcgtattctgtaaagtaaacatagtttggaatattggtgaatgacttgtattccgttcaggttttacggattctaccactttctcaaatgggatgtcctgatactcgtatgcttttagtgctttttttcttatctgcgacaatagttcttggaacgtcggatttccactgaaatcagctcgataaactaacgtatttgcaaagaatcctattaatccctcaatctctttcacatttcgattagcgatggggcttccaactataatgtcgtcctgtcctgtataacgagaaaggaagctttgatacgctgccatcaatgtcataaataaagtgcatccttcttgcaaacttaaatctttgagcttttcctgtaaggaattcgccactattaaggactgacttgcaccacgatgggtttgaactgcaggtcgaggacgatccatcggtaattgtaaaaccggtagttccccagataattcttccttccaatattgaagatgctgattcaaactctcctctttttgccattccttctgccacatgacaaaatctgcatattggatagataactccttcaattccactggttttccggttagtgctccttcataaaaagccatccattcttcaagtaagattcccattgaccatccatctgaaataatatgatgcatcgtacaaatgagaacccattcttccctgtccactttcaatattcgtgttcgaatcagaggaccttgtccaaaatgaaatggttcctccgcctcgttttgaataaggcgtttcatttctctttccctatcttccaaagaaagatctgttagattcgtttgaggaatatgcctgaacacatgagattgaacctgttgaaaaggttcaccctcttgttctagaattgtcgtccttaatgattcatgacgctccaacaattgattccatccgacctccaatgcttcaattgaccatttacctgttaagcgacacgctgcatgaatattgtacatagcactatttggcattaattgatcaataaaccatagacgtttctgcgcataggaaagtgggataacttcttctcgtttcataggtacaagaggagcaacctctcgttttttatcttcttttcgtaactgatccactcgtttcgccaatgcttccactgtatcgtgcttgaaaagttcacgtaatggaattttaatttggaacatttcttgcaatctagagacaatttgagtagcaagtagtgagtgcccaccacgttcaaagaaggaatcctgaatgccaatattttctgttcctaacacttgactccaaaccgaggcaataagctcttccgatggcgtccgaggtagcacatttaaatcttcaatagcttgctcatcaggtgctggcaaggcctttcggtcaattttcccatttggagtaagcgggaagtgttctaaatctataaagtgcgctggaatcatatgatttggtaattgtttttgtaaatactctctccactcctcggtatttccatcgcttattacatatgcaaccaatcgttgatcacctggacgatcttctctaactaatacgacagcctctttaataaacgaacatttttctaaagtcgcttcaatttctcctaattcaatcctaaaaccacgcattttgacttggtggtccattctacctataaattctaaattcccatcagttaaatatcttactgaatctcctgttcgatatagtcgttccccaaatcgatatggatgcgaaacgaatttttcagcagtaagattcggacgatttaagtatccacgtgctaaaccagcaccaccaatatataactcaccctcaattcctattgattgcaagcgttgattttggtctaatacatataattgcgtgttctgtattggctgcccaatagaaacaaattcttgattaggctgaatatcaaatgcattcacataaatagtggcttcagttggcccataaaagttggttaatttcacttgtccactataattccatttctgttgaaatcgtctaaccaaccctgaacttagttcttctccaccagaaaatacatggcgtacggacgaacaattcatattcaattcaatatgattgaagtggtctaagaaaacagataacatcgaaggtacaaattgaactatagtaacctgatgttgtttaatcacttcagctataatagaaggatctttttctccacctggaggtaggaaagatacacttgcaccaacgtgaatgccccaaaacaattcccaaacagagacatcaaatgagaatggcgttttctgcaagaccacatccttttcagaaagcggatatttatgttgcatccattctagataattaattactgaatgatgctcaatcattactccctttggattccctgtagatcctgaagtatacataacatacgctaaattttctcctgttacaccacttatacatggggttgattcttctttttcaattgcagtgtaatctttattcatacaaatcgtttctatattttcagatacaaacaaatttttagaattctcttccgtcactagtacttcgattccagcatcctctaatatatatcgaagtcgactctctggataagtagggtcaagtggaacatacgctgctcctgattttagaatacctaataacgctatcatcatttgtaatgaacgttccatatataccccaactagaaactctgggcctacaccatgcttttgtagataatgagctagctgatttgcacgcttctccaactctttataggtaatttgttcattttcgtaactagccgcgattgcttccggtgtttttttaacttgctcctcaaacatcgtatgaatcatgccttcagccgaataattaaattgagtatgattccattcctctagtaactgtatctgttcttcttctgttaaatgagtaatttcaaatagttttgaatctaggctcttcgtcatctgaattaatatttgcaataagtgattctgaatcagatttattgtttcttcattaaaatagcttcgatcatacatcaactttaaagtaattttcttaccgggcattacaatgagtgttaaaggataatttgtttgttccgtgcttgtaacatctagtaatcttaaatcatcatttctctcaccttgaattggataattttcaaacacatacaaggtatggaataaggagctatttcgcggaacctcactccagccttgaatatctatcaacgaattatactcatactgtcttcgttccatttctttcatttgtattttacgaagccaatctactactgatgtattatccgttaatcgaattctggtaggtaatgtgttaataaatagccccaccatattctctgctcccattaaatcagtaggacgtccagcgctagttacgccaaatacgacgtcactgtcaccgctatacctactcatcaaataagcccatgcaccttgtactaacgtattcaacgttaatcgactatttcgtacccactcttgtaacttctcagtaagtttctcagatacttgataaacacactctccatagcccttctcttgtccttgatcctttctttccattgctaatggcgtaggtgcatagaacccttttaattcttctttccaaaattcctctgcttgactttgatcttgtttatttatccactggatatattttttataaggaagagatttaggaagagtcaataattctccctttatcatcttgagataaacttccatcacttcactaaagaccaatgacacactccatccatctagcaaaatatgatgatgtgtccaaataattctcgtttcctcttttgcttctttgatcgcagtgactctcatcaatggtgcttcatccaataaaaatccttttctacgatctacattcaaaaactgttgtaatttcttcaccctttcctcatgtggataggtgctccaatcctcttgatgaatagtaaaaggaagacgttggtaaaccgcttgtagtggcttttctacttcctcccatacaaatactgaacgtaaaacctcatgtcgattaataacatattcccaagccttttcaaaagtatcaacatccaattgccccccgagcaagaaacctacttgtacaatataggaaaaagaatgttcatcatcttgatcgtataaagtatgaaacagtattcctttttgcaaaggtgataaaccatatatatcaataacgtctcccatttttacaccctcttctttgttaatttaagtaatactttgctcaagctttcttccgtaagatcctctgcatcagcaaaatctgataccgtaaaagcagactctgttgttggtttatttataagttgacgaagatgcctcaacataccatctgctatcacttgaatttttaatttagaaaactgtttcctactatacatccaaataaaatgtaacttttcatctttcaccattccgataacatcaattagatgagatggtttggaatctggagcatgatctaaaaatgtaaatcctgtctcttgcataaacaaagagtcccttgaaaacacctgatcaaattggcccaaatagttaaagcttattgaaggcttttgctgataaaacggaagtaatcctttattcaagtaacgtaaaatgccatagtcaactccgcgatttgggattcgacgcaattgctctttgactgcctttaacccttcaataggtgtctgagttccttgaaaattgagatgaacgggataaatactcgtgaaccagcccactgtccttgataaatcaataccttcaatcatctcttctctcccgtgtccttctagatgaatagaaacggtttgctgatttgtacaatcgacgatagcttgtcctaatgccgttaatagtacctcatcaatccttgtcttatgagtgactagaacttcgtgaaacaatgcttgtgtttcttctattcctaaagtcctcgtcacttgatcaatcgattcttctgtcgtttcttgtattggatagtccattggaattttcatcgtttctttttctacttgttcattccaataatcctttacttcttttgaaatacccgaatcactgtatgtctgaagtcgttcagaccattctttaaaagatgtacttttcgcaggtaagcgaatttcttgaccttgtttcatctggttatataccacctgtaaatcttccaatagaatcctccatgacactccatctactactaaatgatgtatcacccagaatattcgatcattttcagtcaagttatcttcaaagtacactactttcattaacggaccagtaattaaattgaaactagcttgatgaatattcatctcttcttgtattattttattccactctttttcattaacttgattccgttttacaacatggagtactgacagctcatcagtcccttcatttctctgtctccacgttccgtttggtaactgttcgtaccggaaacgtaaagcatcatgatgtttcagtaaatttaatatcgctccctctagtaatttcacatccaatctttcttttactcttaaaagcattgattgattccaatgctctgtatgtggatgttcttgctcgaagaaccagcactgaattggagtaagaggcacatcacctatcacaattccctgctccgcttgtactccctgcgtttctatagccacttgtgccagctcagcgatagttgggcattcaaacatttgctttggagtcagttttaaccccacttgacttgcttgagatatgatttgaatactgagaatcgagtcgccaccaatttcaaagaaattatcatagattcccacctttttaacacctaatactctcttccaaatggtagttagtatttgttcgttactattccgagggccaacacattcactattaatctgcttttcctccggcataggtaaggcctcacgatcaactttaccgttagttgtaagtggaatagcttccatcgccacaaatcccgaaggaaccatataacttggtagtttcgctttaagatattctctccacgcatctacatttccatctcctacaacatatgctactaatcgtttatcgcctggctgatcttctcttacaattacaactgcctcttttacatatgcatatgtatgtaaagtagactcaatttccccaatctcaattcggaaaccacgtattttaacctgatgatcaattcttccatgataatctagattcccatctggcaaatacctcgctaagtctcctgtccggtataatcttgctttcagatcactactaaatggatgagatataaaacgctctgctgttaattcaggtctatttaaatacccacgtgcaagccctgccccgccaatataaagttcaccatcaacacctataggaacaggttgttgataagcgtctagtatatacacttctaaatcgggaatccgctttccaatattacttcttgaaacatgctgcacatcatctaaagtaattggataatatgtaacatgaactgtagtttctgtaattccatacatattaattaactgtggttttttctccccatacctttgaaaccacggtaacaagctagtaggttctaacgcttctccgccaaatatgacataacgcagctgcaaatttttattcttatcttcttgttcacacacttgtattaattgtcgaaatgcggaaggtgtctgatttagaactgtgacttcttcctccaccaataattgataaaaatccttaggtgatcgactaatccagtacggaacaacaactaattttccaccatataataacgctccccaaatttcccatactgagaaatcaaatgcatacgaatgaaaaagcgtccaagtatctttttcattaaactgataccaacaatccgtcgatttaaataaccgaatgacattgtgatgttctatcataacgccctttggatttcccgttgatcccgaagtatagattacatatgccagatttttgggaccgacactagaaaccggcaaagtcttactttctttcccaatctcatcttgatcacgatccaggcaaatcgactcaacattttctggtaaccagttcaattcttttaaactttcttgcgttacgaataactgaatgctagcatcttctaaaatatattgaagtcgttgctctggatatgttggatcaagtgggacataagccccaccagccttcaaaatccctaaaatacctacaatcatctcgtgggaacgttcaacgcacagtccaactaaagtatcaggtcctactccttttttctgcagataatgagctaactggtttgcacgtccattaagctccttataagtaattttttctttttcatacgtaactgcaatagcatttggataaatcatcgcttgccgttcgaacatttcatgaatagttacttgaggcgggacatccagtttaggattgttgaactcaactaaactttttcttttatcttcctcagaaatgatttctatttcagccaccttctgctttgggttttcaaaagtgttttccattatcgctaacatcacgttaaaaaaccgttttatctcttccttagaaaatagctcctcacgataatcaatatgtacatgtaaagagtctatatcaattagattttcaatatgcactgcaaaatcttgtacttcttcacggtttggaatccatagtgagtcaccactttcatcacgatccctataatcaatcgtagttccgaaaagtctcacattactgttattctctttattaatctgctttaataacaaatcaaatggatatttctggtgtcttaatgatttactttgttttctggacaccctactaataaatgaaagtacttcttcttctggatcaatatccattcttaaaggaactgtactcaccatcattccaatcaattttcgttccattttagtcatacggttgccgtaagccattcctaaaccaatatcaaacgatgaggtccaccgatacatggacaacgagaaagcagcaacaaaaagggtgtataaaccaaaattgtaatcttcagaaaatttttctatctttctcttcaaatgctccgttaatataaacgtctcacgtgatgctttggtactaacttggtacgtattataaggcttcaacccggtcatagatggcagtgttttaaattcctctaaccaaaatttttgatctttttgaaaacgactactattcaagtatgtttgttcattggtcagaaattgaacatatgaatttttaatttcgccttcctcattctcgttatgcatgtcataataatattttgcaatctgctcagtaaatatttgaattgataaaccatccataataatatgatgaacatttccaaagactgcacattcattatcgtttaattttattaaagcgaaatagtataaattggaattaaataatgtaaacgtttcttttgttttctgctcaatccattcctcaagcaaatttgtattctccacattactgaaatcaaaaaactcaaattcttgttcttcatgtttaataaaatattgtttcggttcctgatgcccattttcttttaacctaatgcacagaccgtcattttcactgataacgcgattcacaacttggtttaattttgaatagttcattttccgatgaagtttaaataaaaatcttaaattacatattcctttatcagaatgaataacttctgtataccatattcttcgctgcggatggcttaatggataacattcctcattggtcataaaaatcttcccttcaaaaattatttgctcttattggttcgtgtttatgtttagcccataaatatttctgcagtgaaactccaattactccaataataacaagcccaatccctccataaacatagagttgagttactccaaataaatgcactaatgggccactcatagcaggggaaataattaaaactgcgtttgttaaactgctttgtataccaaatactcttcctacttgatcttgatcggattctatttgtaatatgacttgattagatacaagcatcagcccacttccaataccagcgataaaactaattaaataggctaaaacgaagaccgtaccgggcgttatcaaaccaatccccccaaaaccaattcccattaaaaccatacctccacatactacccagccatattgaaattgttttaatttctgagttagtaatgcaccaagtattccgccaagaccaataatagaaatgatatatcccattttacttttatcatgtgggaataaactcttaaataaagttgggaattgtgagtctactaattgtaatactgccatggctattgtaacgaaaatcatggttgataatattatccgattagataacacataaccccacccttgtacccaagcggtccaagtactttgtttttgcttttcaacaaattctttcgatatagtttctttaaattttattgtgggtatgagaactaaggtagctaataaacaacttatagctcttataatgaggcagaactctggttgaaaccaactcagcaacatgccccctataagtgggcctactatctttgtaccctgctctactattccgttgatacttactgctttagtaagcaagtccggggatacaatctgtcttgttagtgtttgctgtgcaggataatagaaaacaataaaaatggaacgaatcattaacgccactaagagccagtggatatcttgtacaaataaaagagcaattgttattagaccaaccattagattacagaacatcataattggaatttttctaaaacgatctgcaataacacctgcccatgagccaaaaataattccaggaagtgcatatgcaacaggaatcaatccaatcatagtaggatctacttcccattcaaacccaactatagtcataatcgctaacatatcaataaaaacaccaagcataagcaatgaataggcagagaaaacttgtaaataaaccctatttcctaataggccttttgaatcaatagttttcataaaagcaagctccttaggttactaatataaacgcttttgcgtataaggtacctctttattaaacttaattaatcattattgacatctcacctagaatttaacttcgtcaaaactcaaactactcttgtttttcatatatttaaaatagtcagacaaacgaaagcgtacctatttcttcatttttatatcaactgttacaaaatatatctttaccttacactaataacagctaaacgtttccttaatataaccctttacagtcgtttgcacattcaattcacatcctttttaaagttggcttttttctatctcaaatactatcacacaaatatttcacctactatattcataaagttgaaatatttgaatcagaaaattcggataaaaaactaaatccacaaatcataccaaacaattatttagttatattgtcattttatagatagctttagccataaggatatcaagaattaagttttttaattttattaacataatagtttatagagactataaatcctactaaacaaaaaaataaatatacaataaagtatatttattttttcttatcctacatattttctatgcaaattaattccaataactaaagttgataataaaaatataatattaccaatcactaatgtactcataacaagaattgaataatatagtattaatacttctgcacctactacctattttatttattggatatttatacttcaaaaaaaattacacatcattcacaattaggatacatacccaaaatatcatttgaacatgttattatattttaagataatataaaatcagtttttctataagagaacttaatttttatgtagtacgaaattgttagtaatacagcatatactaatttagttataaaaacatttaaagaccacctatttccataagtgatctttctttgtgattctgtatttgtgcactactgtagaaatatatcgtagaaacgctttgtttgctaaatgtttagttctttccatttactaaaaaacatagcttcatacacttaatatcatattcgttacattgcaaactattattttgtcttctgtacaggcaaactactaaaaatcaattcagcaacttttacatatccttttgagtttggatgaattaaatccttagaccaaagcgtattgtcattaactaaatgatgattccaaaaatcaacatgatgaagcttatactctctgctcagtgaatgtataacttcatttgcctctaataattgttcttttatttcttgttttttttcagaagcaaaaggaagcctaactgtaaaatcaggaaggtttgctataataatatcagcccctgctttacttaatgtatctatcataaattccatatcgttcttatatgcatcatgattccaacgtccttttaaaacatcgtttgcccctgcaatgagactaaccaaatctggattaaaagttaacgccttttccaattgctgcaagcgaatttcttcagttactaacccacgctttgcaaaattggcatattctatatctttttcacacagttgaacaaaatgatctacccagctttttaatgcaattccctcaacttcatcccctatcccctctgtaaaactatcaccaattgctacaaatcgcttccacatatgtattccccctttatttttaaacatatctatactatacaatagctcacaccgtaattgttatttctaagtggttttcgatttcaattatattccactttactatatttacatttagaatccaaaattgaccgattcccaagtatactaaggaatcggtcatattcgtatatttactaaagaaataaaatccctctaggacttatacttttttcaaaaaatttgttgttctttgttttgcccagttgatacatttcttttcgattacatgatacgaaactatagaaaaaagtagtgtcattgcaatgcacaaagtaagaagaaaaaattacaccctgacattccaagctatccacataagaatctatagtgctttgaaaccttttgtttcaaactaatatttagttgtatcctataaaattagctttttactatatcaatcgtacgatcccacataccactaaaaaaagatcctgttttacgtataaaacgtgtaagccaatttgcttgttccacatcagattttgttacaaggtctatttgtaatgaattacctgataagaacccaggatctgtattatctttagacgagataatcattttactaattgttacaccttttttaataggcgcttcttgttccgtattcgatactttaaattcttttttataaatgtctttattgcccttcggcattggaagtgaaacagcttgcttcgtttgaactactacatctttgtcttttgcatttgccactcgaactgtttcatgtccttttattactgaatcttttccgtagacattcttcacttcaaaattcgcaaatccataatcgtataatttctttgtttcatcaaaacgtgccgtatgagattttgcttttatcactacagaaattaggcgcataccatttctttctactgtaccagtgaaacaatctcccgcttctggagtcgttcctgttttcaaaccatctacaccttcatattgcttaattaaaccttttaacatccagttaaagttcgccatatcaattggatatttaccaccctcttggaatgtttttttaggaatttttgctgtatttaatatttgggggaaatcttgaataagacgttgtgctaaaattgcacaatcccttgcagacattttatttttctcgtctagagttgtcccttctagatgatatccttttaaatcttgatttgttaagccggtagagtttacaaatttatagtctttcataccaaactctttcgacttatcgttcatcatttttacaaaattgacttctttaccagcaatctgttcaactaaagcaattgttgcaccatttgcagagtaaattgccattgcctcatataactcttttaccgtataagagccaccattttctaatggaacatttgatagtgaacgatcttgcgaaatcttatgtgcatattcagagattttaactttttgatcccatttaagttttcctttatccaccgcttcatgaactaagtattcgctcatcatttttgtcatactagcaattgccaatgattcatctgcatttttttcatataaaatttttccggaatttgcttctattaaaattgctgatcctgcttcaacgtctatagcaggaactgtttccgctgctgcttttccaattgtaacgaccatgctacaaaatagtgtaagcactgttactattgcaataactctcttgcaaaacatacctttcacttctgttacctccaatttctttgtactcaaaaaaagcgttattctaacataatcccgcaaaaaatagacagtgttctcaaattatatatacatataaaacgttagaatcgctttcatatagaccacctcatccgacacttttaggtgcgctaatactttgtattcccacacatatccttatttttaatccccttatatttttcaaaatgattcacactttcatattttttaggattacagttaatagacaatctaaataatacatttgttccacatttacaaaaaataaaaaactacaccctatactggatgtagtttttctaactgatttatttatttttcacttcatttttataaaaagcaaataatggttcgatggatggactagataacagcggaattgccttctcaatcaatttcctatcccaatcaaaccaacgcatttccattaacatgtttatttctgtatcagtgaatcgtttctttatttccttagcaggatttccaccaactattgtatacggcggaacatctttacttacgactgatcctgcagcaacaattgcaccttcaccaatagtaacgccaggcattattatagcattcattccaatccaagcatcacttttaatgactgtatctcccttaggttcatatgattgtttaatttgctcagcgaatggatatactgtaatccattctgagtgatgattatgattaccacccattaaaatgactaccccgcttgcaatgcaaacataattcccaataatgagtttgtcaaggtgccatcccatctgttcaattggattgaacagtgcttgggacttagcatctccccacaaataccttacacagccatcttcaaaattttgatgactataatagcctgaataataggagtactctcctacttcaatgagtggatttgttactatatcttttatatactttgtttctgaccaatgattaaataatggatgcttcataactttattcctcgcttctaagtattatatatattgctatttacttagaagcttactacgactgctacattttttagctttctcaaacgacgaatcattatcttcaagcctttcttttatactataaaaaagcataacgcaatacattacaatagtcaaactgtgtaattttgaacacatcttaaacagcgtaatactgcaataaaaacatgaaaacactctaacttcgatacaaataatatattgattacatttagtttatattttgtaaaaaaattttaattgccataacaaagcaaacaataaccactattggtcgtattaatgacgtcccttttgtaagcaccatcttcgctccaatatatgatcctataatttgaccaagcatcataatcaacccaattgtccaatcgatttggccaaaaataataaaatataacaaagcagcgaaattacttgtaaagttcaaaatcttagcatttgcagtcgcccgtgtagcactatatccacataagagaatgaacgctaaagcaatcaagctacctgttcctgggccgaagaaaccatcataaaatcccagtaacggagccactgttaacgcaaacaacaacatacttattttcctcggtcgatcttcgtttgctatatttggagataatagaaaataaatgccaataaaaacaagtaaaaaaggtaatatcataattagatattctgcccgtatctgtaaaacaagccatccaccgaaaactgatccaaaaaaggtcattaagatggacaaacgcatttctttaagattaatttctttcttcttaataaaaaacactgttgccatgagagttccgctactcccttgcagtttattagttgctatcgctacagaaggagacatacctactaataacattatcgggatagttatcataccaccgcctccagcaatcgtatctatccatcctgctaatacagctactaaaaatagtagtatgagtaattcaatagtaaaatccatacaaagaatatgggaaggcttgagctattataccccaaacctccccatcttccctcctctctttaaactagttaattaaatctttaaagtaactttctttctgatcacgtaatcggctggaaacgtattgcctgcaaacaattcttcttccgtatttattatttccaatcgggattttatattcttcctcagataacctttctctaccatgagttacatttgtttgtttaccatagtatgaatttgggataattaataaatcttcagatgtaagtggaaccttataagtaggcgttgttcgtaagagttctaaaaacatgtcaaatttcaatttttcttcttcactttctcctacataaatcaatctattctctgctccatttaaacaagttgcaataatatcaccattatcatctaaaaatataatttggtttatttcccctacaaatcccgatatttcaccatcagccattcctgcgatatgagcaataggcattttacttatcgccaatatgtcatctttactgaagaaattttcttcaagatgcttttgaagtaattttggcgttccaatatgagtttgagtttttaaatttaacactccttttaataaaagagcatcaactctagtaaattttccacaagtaatttcagacactattcgttccacggatttattaagtctatttgatacaatttctaaattcgtattgaatgttttcaatcttgcttcaatatctgattggtctttcatatctgtatacactgtggcatcgttatgttgataaaagttcccgccaccggtgcttgcaccgacatttcgcaaaacttcatcgttatttaaaggcgaaataagatgaaatctatttttcccagcatgttcggatgggtgaattaaagcatcataattaaaaagtgtggcaaaaagccatgtgacccattctgcataaaaatattttttcattctatcgtgttcgtcttcaccataattaaaacctctgcgattttccccaggtaatagtgtttctataggatcacatggagtatttttaataaggataggcggtacgttcccgccacaattcgctatttttatcatatgtagtaggtttttcatatctgaattcggatttttctttgaatagtcaatcaaacaattaagccactcttttgaaaaatatgctgctatttcttgatcacaagtataaggattatgagtttttaattcattttctatcagattcttcattttatccttcaatagattcggaatagtaatttcttcaatttctgtaatctgcagtattcctttattcattataaaacctccgttgttttattttttacaccctatcttcattaaacaaactatccacttcttttttactcctttacttttcgtcagagctattagaattaccgatttacaaataaaaaacatggagtataagagatttgttcttagctacatttcccccacgaacctctattgaattgacaaatttaatttgaaaatctgattcattttcatactttactttcaaactatgtttatatgattttcaattcaagtaagagtatttcattttctaaagttttcctaattttaaaatcagaattttcaatacaactatgttaacattaaaaatataacacgaaaccaaaaaatgtaaatgaatagttttttctaaaaaatagtcagactattcacaaggtaattcgtattccattgaaccaactacggcccctcaattttattgataacaataaaaaagccccctaaattgaagtgacccccgaaagttagacaggtcgtttcattaggcagcctctagggtatgagcccggtattgtactgggctatttggcacgcccttttttagaaaaacaccccctatttatataaaaaactccccttgacttctcatagttggtcttttatatgtacttctatattttgccccattatttctacaaatttatgaatgttaattccccctaagcttgaaataatttttgaaaagcaaaaacgatacaccaaacacctataccgagtaggacagatgtactaagtgtaaatgaattttttaaaccaatatagacaataaataatagtagtgctgatgcggggaatccatataatacccctaaagcaaattgactcaattcttgtttattcccgccttcaaatgaaatccaaaatagactaagtaaacttacgagaggaagagcagcaataaagccacctatcgtactataatgtttggcgacttcagtgataacgccgataataagtgccgaaacgattactttaacgaggaaatgcatattttgcctccttcgctaataacgaaaatgctttttcaattaattgtagttcttcttttgataactgtgattctaatatttttatcttttctttatctagtaaagtatgtttttctaatacttcaattccttcaattgttaatgtaaggtttaccactctttcatcttttttatttctctctttaacgatgaaacccttttgaataaggcgctttatatgttcagatgctgtgttatgagaaaggctaagctcagtagcgacttttccaattgttatatctttctcacgagaaacgatttgtaaaatacgaattgcttggtgggaaagattgtcctcgtattcgtatcgtaagtgataataaatgctctcccaatgttgattaatgttgttcataataataaatccccttttttatatcgtatagtaagatatattcgttgttttagaaataaaatccttttatttggataaaaaatgttgaaaaagtttatttttattgaaatataaggtaatctatgtgtaaaggtatacatttagcaagagagaggatgatagttgtgaatacattcaaatggatgagtcatgaacagatgtatgtagatgaaatacatgttgaaaaatgtggtcctctttcagtcggcgtatatgggggaaatcaagaaagtgatgcatatgaacgaggagatgcggtacttgcttggtgggaccctgaattacaatttgaatttgttatgatttttgatacacaccacaaaacaaaaaatattgattatataatagaagcgatttcagaaagaaaagagaaattaaaagagttattttcctatccaatacatttagcttttcatcatacacatatgtacttattagcgttatttacagatgagttatttattaaaaagtgtgatcaagatgatgaggaactcgcttgcttaatttgtttacgaaaaggcgaatttttatattggttatcagttggtgattgtttcgcgtatttattccattctgagaaaacgaaaaatggaaaaggacgattaaataaacggaaaaattacgaatatattggcaggaaaaatatttttgcagcaaatacaccttgctttacgtcaggtgtaagaggattagaaaaaggaatgaatcacattgtaatggcaacggacggtattttagagtgtgacaaacgaaggtttgatgatgatcaatctttagtagaaatattacacgacggaactcgcttgcagattgagcccgtattaacaaatgtactacagtggaaaggtagagactgtgccacgattattggatggtctattgatactgataataaacaatgtgctaattaatataaaaggagttcaaggtttttatccttgaactcctttttgttaagcaatatggatgtgatatgttttcaaccattcatttacttgtagcatatactccatggcacttcttgcttcaaaattgttaatcactttattactttgatcagcaattgaaagtaagatggaatggttaataagtgagaaaataggattgtttttattgttacacatatcaagtgttaaattacggattgtttgtaagtagtgtggatcttgtgaagttggataagcgctttttcttctattgcgtacatcgtcaggtaaagctggttgtagtgctctacgtaaaatgcctttttcaatattatcaatactttttatgttgaaaggaacattccataaatattcaactaatctataatcgcaaaacggtacacgaacttcaaatccaacagccatactcatacgatctttacggtcaagtaagaaaggaaggaatcttgttaaaaataaataaaacatttgacgttgtttcgcggattttttactttcgccttcaagagtaggtacttcaagtatcgcttcttggaatcgtgtatcaatatagtcttctagattacattggttacttacttcatttagtagaagaggagatgtatttttccaatttgttagccaaggaaacttatctacatatagtagttcttcttgatgaaaccaaggatatccaccgaatacttcatcagccgattcgccggataaagctacggtcgcatcttttttcatttcgcaaaatagtaaatatagtgaagtttccatttcaccagcactcggtaaatcttttgcatgaaggggaacgaataagtgatttgctaattcttcagcattcacaataatatcatgatgcgctgtcccgacatgttcagaaacgcgttttacccaaggagtgtctaaaccagtgcgagcaaatgtcagttcgaaatcttttgcgctatttacaaagtcaacagaatacgtatgaagtgttttattttcagcagcaaattctttacccgcaagtgcagtaataccgctagagtctaatccgcctgataacatacaaacgagaggaacatcggcaattaattgtctttttactgtatcttgtaaaatagataaaatatgcgaagatgtatcttctatagagtctgtatggaacttactttctaaattccaatacttagtaactacttttttatgacgtgtaaatgttatagaatgtccagcacgtacttcttgaatatgtttaaagacgccacatcctggagtgcgaaataagcctaatccaaatatttcatttattccattcgcatcaatttcagcagggacagatggatgcgctaataatgctttaatttcagagccgaaaataatactgccatttctttctgtaaaaaagagtggttttacacctaaatgatctcgtgctaaaaacaattgttgcttctgatcatcccataaggcaaaagcgaaaattccgtttaaatgtcgtacgcagtcttctttccattctaaataagcatgtagtaatacttctgtatctgaatgggtttcaaatgcatgcccacatttttgaagctgctctctcagttcacggaaattataaatttctccattataagtaagagcatacgtataatcaccagcacgaaatgtcttaggctgtgtcccgccttctggatcaattacaattaaacgccggtgtgcaaaggccgcatgaggtgaaaaccaaaatccttcagcatccggaccacgatgctcaatactatttgccatcttttttaaaataacatgttgatttgaaaggtcttctttccaatctacccaacctgtaattccacacatacacatctcatctcctaatttttaaaatagattaatgaaataaaatgtacactaaattaaagagtgactatataaatagtgtactacatgaattaaattacagacttgagaaagttttctttgaatgcatagttatgtgagaaaatggctaagggaaagtattccattacatacaaaaaataaaaaagatgagagaaaaaattttctcagacgttatatagggtgtaaaagcttttacaaaacaataaggggaatcgctacatgaaatcaaatgagaaaaattttataaaaagattacagcggcaaaaagaagacgcgttagaattcgttgtcgatacatacttaccactcataaaggggatcacgcataaagttctacttcccattcaaaatgatggactcatagaggaatgtataaacgatatatttctttccatttggaataacgcaaataaattccatggagagccgagtgattttaaaaagtggattgcagcgattgcgaagtttaaagcaattgattattaccggaaatcgactaaaacagtagaaatcatttcagatgagtttcatatcagtacagaaaaatcagcagaagacgaattaatcgttatggaagatagggaagaattattgaagctcattaatcaattagaaccgctagatcaaaaggtgttcattatgaaatatttacttggtatgaagacagaggaaataggtgacaagttaggattaactcgggcagcaattgataatcgagtgtaccgggggaaaaagaaactacaacaaaatgctacgaatattagttttggaggtagtgcaatatgaaagacatttatgaactattaaatgatattgatatagatgaaaaagaactagaagaaattgaggcttctgaaattgaaaaggaaaaagtaaaacgaaatgtaaaacaatcgatacgtacgaagaaaaagatgacaagtaggaagaagggtgtcgctgctgcatctattttagtaggattatcggttgcaactcttggtatcggttttcctacatatgctggaggattgccaattgtaggtgacatattccgatttttagataatggtagaacggggttatatgaaaattataaggaattttcgactgagttgaatatgacaaaagagagtaatggggttaaggttacaattaatgatgtaatttctgatggcagaacattatctataacgtattcactggaaagtgagcaggacttaggggaggatcctatcatattaggtggattggatataatggacgctcatggtagttcaggcagtggtaaaatgactaaagttactgaaaaaaagtatgtaggtatggtaacaacgacgcatcatgatagcaataaaaaggacaaagtaaactttagatggaatatagagagaatagagatgccagataggaaaaaatcaatacaaggtaattggaatttcgcgttaactgtaaaatcagtggatagtaaagagagaacaattggtgggagttcggaaaaagaaggtataaaagcaaatatggaaaaggtcgcaatatcgccagtttcatttattctttattacaatcaagaggtttctaagggcgcgaggaaagaatgggatagtgtagatgttgaattgacggttaaggatgatttagggaatatttattcgggtgaaggaaatgggggaagtggcaacgatccttacaatatccattggagtgccaccttccaaaaactaaacgaaaatgcaacaaagcttatcgttacacctcgcgtgcacttgcgagtacatacacctgaaaatcatggtggagtagagtatgtgaatgggaaagagaagaaaatagaagtgccgaaaaaagaagcgaagagcaaagatattgtgttagatgatattgtcattgatttaaagaaataaaagagagactgtctaaaatcatttaggcagtcttttttcgttaagaactagtgacgaatagtgcatgcggatgctgcgttttatactcatctttccacggaatgtttagttgttcccacgattcgccgctatcattggattgaaagacgccattgttatttaacgtgtagaacgtatgtggttcggcttcgtttgtcgcaaacatcgaaatgactgtaccgattgcagatggtagtccttgttgtacttgctggaacggagtatctttcgtttttcgataaatataagattcataagggatacgatgatgagcgagatcagcacttggcgcagcagaaacgagaatcgtatcacaatcagctggatcgatagccatgctgtataaataatgatgttcaagtcctgcactacatgagatccaactgtttccattgttataactctcaagataagcacgatcaggtccgcccataaatccgtcaccacatgatgcataaaggcgatttggtgctttagggtgcataagtaattgatgagcatcgataggagcaccgaattttttatcaatccatgtatgccctttatcgttactttgaataacagcaccagcttcgattgaaacgtgtattgtattagggttatttgggtcaactgtaatccagcgtacgtgatgggtaaaaggtctaggcggaaatgcccacgtataagaagataataatgatttcatatttttaagttcagtccacgtttcaccaccattttcagagcgaaataaagcgctcggttctgtgccgacataaacgacaccatatccgttaacttgttcatttgagcttattgttatggaagtgatagaggagtgcaaaataccatcttctttagggaaatcaaagtaacgataagaatctccaattggtctccatgaatccccactatcgtcacttaaccatagacctcgtccaaatgttccgcaatatacacgattcttttgaaatggatcaacagcgatacaggtaggttgcatattttgtaagtgataagtcgtttcatagttatcattgtgttctttcactacaacaagttcacgttccatacagagaaataaacgtttcatttaagtaacctccttaaaaattctttcattagtaaacaatatgaaaataaaaaagaagtagtcttgttttatttgagaaaaagggattgtttaaaaaatagcgaagtgtgtatacagaggaagcgggcgtttacaatcagtcaattcgggataaagatggggagtttgtttcatactaacatacagatattgtacttaaaggagtataagtatgggacattcgcatgatcatggtcattcaaaaaataaaaaggcgttactaattgccttcctactaacaacaagttttatgattgcagaagttgttggtggatttgtaacaaatagcttagcactactatctgacgcggggcatatgctaagtgatgcagtatctttagctttaagtttacttgcgtttaaactcggagaaaaaacagcaacaactgcgaaaacatacgggtataagcgagtcgaaatgttagcagcattatgtaacggtgtcgttcttattgtcatttcggtatacatttttattgaagcaatccgtcgttttaaagaaccagttgagattgctagtaatgggatgctcattattgcagtccttggtctgcttattaatattttatcagcttggatattaatgagaggcggagatgtgaaaggtaatttgaatttaagaagtgctttcctgcacgtactaggcgatctattgggttccgtcggagcgattattgctgcgttacttattaaatttttcggatggactgctgcagatgcgattgctagtattcttgtgtctattttagtcattattagtggatggcgtgtaacacgtgatacggttcatatattaatggaaggtgcaccacagcacataaatgttgaagaggtaaaaagtacgttattaaatattccgattgtcaaagaagttcatgatttgcacatatggtctgtcacatcagattttcaagtattaacatgtcatcttattattaaagggaatgaaacgcaaagtgtattaaaagaggctacgtatgtattaaaggagaaatttcatgtagaacatgtcaccattcaagtagaaatagatggtgaatttaatcatgatgagacaacttgcaaagtatgaaagaaaaaggataagaaaaagtgtcataacatttttcgcacggcatacatatatataatgtggccacaagtactttgcaaggtaaatatttcatgaaattactttacttataaagagtcatcttttataatcaaaagtggtaattgatagagattatcattttcaatgatcgtagaaaggagttttttaaaagatgagtagtcaactccgttttgctgttgaaaatcgtaagaggcatttaattgatgagttaattggagcaggtgtgtttaagattcgcgaccgacaattatacgagctgtctttagaggaattggaaaaagagtacgaagatatggaagattatgcgaatattcaggcgtagctatatagattagtaaaaagagagctggttacgattttgtgtaaccagctctctttttatttcgtagaaattattttttgtatttctttcatgggacggagccagttttgggtcattatttgttccatttgtttttcgtcctgcttctgtaatgcttgaatgatagagtgatgttcttcaatagattgacttgctggaacaaagttttggaaaaacaaatattcaagacgtaaaacgtgaagttgcatattttctagaaagggttcaatatattggtttttagcaatagaagaaattgtattgtggaattgtatatctaattctaaagcttgttttgcgttttttttctctatagattgctgaaaatgctcatttatttcagaaagtagttgaatatcagcgtttgtaatgttttgaagagcttgctttcctataatagagtgaagaccagccatcgtttcataaatgatagatacgtcgtctaacttaataggagcaattttcgttttttgccctggtaccatttccactaatccagaaagctctaatatttgaagtgcttctcttacaggtgttctgcttactcctagtgcctcagccaattccccattattaattttttcattgggcttcagtacaccttcaataatccaattttgtagttgatttaaaacgagtgattttgctgaaactcttcctggttttttataattttgagggacaggcatagtgaattcaatcctttcattgtatattttccttttttgcatgaacaagctttaatttttgtttcccttcatccggcttttggcttaagatgagcaccattacaatgacacaaaaagcgcctaataactgaaaagattgaaatggcacgtgtaatataagtacagaagaaataatagctgcgagtggctctgtgcaaccaaataatgttgtttctttcggagtcaggtatcgtatgctgtctaagtataaataaaaggcaataagtgtcccgaaaatgacgacaaatgtgatgagcggtagggtacttagttttacatatttcatagttgataataaaatgaattcgtttgtagaaataaagtgtacaatcgttacaccaatacccccaataatcatgccccatccaacgataacggaagaagaccatttttctaacaattcctttgaatataaactataaaaagcgagagataatccagataaaatcccccaaataatagctggtgtagaaacagccaagttatgaacagacccgtttgttagtaagagaaaagtgcctactaatgaaagggtaattgaaatgaaatcaatttttgatagacgaacgttccatttgaaaagtaagtatacagtgatgaatataggagctaaatattgtaataatgttgcgacggcagcatttccttctttaattgaagcgaaatacgtatactgtacagcaagcataccgaatagaccaaacaaaatcattttaatagcatcagatttttgtttccaaatgctaaatatctctttttttctcgttccgaatgaggaaataatgagcaaaataattccagatataagtaaacggatcgtaactaaccattcggttgaaacattgtcatattgaaaaagttgttgtgcagctgtaccagacaagccccataaacaagcaccgattatgaccattataattccttttaatcgatttgaatccatatgatctaaaattctcctttctaaaaatacaaattgaatacaatatgcaatatatcacagaatgactcattaataaactgaaatttctaatttgttttttatgtatagtaaaatattgtagaggagggggagtatatgttagctggatttttagtttgtttatttgtagggttacttatcatttttttagggtatcaaatacatgtgaaaaagaggttgtttttgttagcaggatatcaagaagaaacgtttgttggagataaaaataaattagcgaagctttcaggagcattttcttatatagttggagttgctactataatattaccgcttggattggaagaaataggtaatttagttggtatcgtatatgctatattaattgttttaggtacaattgtattcataattaaagcaaacttattaaataagagtactataaagtaaaaaggcttcattctactgaagccttttattaattgttatgaagtataagtaaaagccgggataggatcaataaatgtattccagttttgttgcatttctttttctgttaatagacaatcatctaatgattgttcaattaacgaacggttcatatcaattccaataaatacgagttcggttattcgatctccatattgtttatcccagtttttcaatacttctggttcttctgtaatcatttgatttctttcagtttcaggtaatgccgctatccactcaccggctccttgaattgtaatagaggaacctgcttgagatagaagccctatcatattattacgagatgccagccagaagaatcctttcgctcttacaacatctaaaggccatctttctagccaattcataaggcgctcgggatggaaaggatatttgcggcggtaaacaaaggaattgataccgtattcttccgtttccggtgtatgatggtcactatttaattcttgtatccagccggccgattgactggcttcttcataattaaatagatttgtgtttaaaatttcttgtaatggtactttgctaaacgaagattcaagaacttttgcattaggatttaatttttttagtaaatgatgaagctctatcacatcttctttttctagcaaatctatcttattaagaataattacgtttgcaaattcaatttgatctattaataaatcaataacttctcgggtatcattctcatcgattgcttgttttcggtctaataaactttctccatctgcaaaatcatcccaaaatctatttgcatctacaactgtaaccatcgtatcgaggcgacaatttttcgttaaatcaatgttaaggacttcgtctgtataagtaaacgtttgagcaactggaataggctcacttataccagaagattcaataataatatagtcaatatcaccattttccacaagacgattcacttctatcattaaatcttctcgtagtgtacaacaaatacagccattgtgaatctctactagtttttcctccgtacgtgaaaaaccacccttttttataagagatgcatcaatgtttacttcgctcatatcattaacgataacagctacttttaagttattcttattagtcaaaatgtgatgtagtaaggtagtttttccagatcctaaaaaaccacttaatacagtgataggtacttttttcatgaaatgatctctcctttaaatcgtaatgattacgttttatattaaacgataagaaaagaaaaatcaataataaatcataatgattacgatttaagaatagaaatagactataaaatttgtgctgtagtatgaagcatttggacaagcacatgtttacatgtaaataaaatggaggcgagaagcttggtctttaatagagtttcaaaagaattagtaggcatagctcttatcgctatgtttctctttttattattttttgtagattttacaagtctagtaaatttgcacacaaatataccgcaggaatggctgaatgtgaatacggtatttttaagtatcatttttgaagcaataccttttattttattaggggtaattgtttcttcatgtattcaagtgtttgtgacggaagatatgattcaaaaagtaatgccgaaatctccaattgttgcaatgattccagcagtatttgtgggagttctttttccaatgtgtgaatgtgtcattataccaattgtaagaaggctcattcaaaaggggctaccacttcatgtaggcattgttattttattgagtgcacccattatgaatccagttgttcttttatctactgtatatgcgtttccaaaaaatgattacgttgtatatgcacgctttgggataacaattctagttgctctattcataggtctaattgtgtattattgctatcgcgaaagaaatgttttaaaagacgtagaggtttcagttcaaataagcaaaaaaaagagttggaaagatgttatgaatcacactgtagatgagttttttgatactggtaagtatttattgattggtgcttttttagcaagtgtatttcaaacgttttttgatcggaatgtactggatgcagtagcacataacgaagtaattgctcccattattatgatggggtttggttatgttttatcaatttgctctgcagccgatgcttttatagctgcgtcttttggacatgttttctcgataaaggcacttctcgcatttcttgtgtttgggcctatgcttgatatgaaaaatacgttaatgctatttgcgtattttcaaaagagatttgtattctttttgatgggaattgtcattgtatctgtgtataccatcgtgcaaatcataatgttataggaggtgagaaagaatggagaaagaatggagaaagaggagcagaaggcatatcatcgctatattcgtggcattattttaattggtttagcaatgctcttatttaaactacttgtaacagggaatatttataattttatcgctccaaaaatgatcaaatttacgtatatagcttttgtagtaattttaatttttggtattgtacaagtttggggagatggaagagaaaaacagcatgattgcaattgttgtaaacatcatacaacatcaaaatcagggataaaaagtttctttgtatatgttttatttgttgttccgatagttagtgcttttctctttggaagtgtaacaattgatggaagtttaggaggaaaaaggggtatgaatcaaagtgtacaggcgagaagtctggaaagaaacgaaaaagaggggaaacaggttaagtttgatgagcgagaagtatcagttgattcagaagaaacatcaaatttagcaacgacttataaaacggaagagcaagtagtaaaaagtatgttaggacagcgtaaactacaagtaaaggataaggattatgttcaaacaatgaatgtaattggtcaaaatgttaattggtttaaagggaaagaaattacattcttagggtttatatataaggataaagatgtgacggggaataaagcagtagtggctcgatatggcataacttgttgtattgcggatgcatcagtctgggggatgattgttaccgggaaaaatattgaaaaaattccagaagaaacatgggtaaaaataacaggattattagatgaaacgacatataaaggaacagtctttccacttgtaaaagtaaacaaaatcgaaaaaattaataagccaactgacccatatgtatatgatgctttacctcaatagaaaagaataaattcttcatattttcatgaaatagaatcataatcaaggcgataaaaaaataaagataagagtaatttggtttgttaaaaatatgtgcagaaggagttatgcgatgaactgggttactcataaaccatcatttgaatttgaaacatttagtcctattattcggtcacaatctgcgtggagtggacatttagattttgcatatgacttagtacgatttgaaaaaccagaaactttagttgagttaggtacacatttaggagcttccttttttagtttttgtcagggagtaaaagatggagggttatcgactaaatgctttgcagtagatacttgggctggagatgggcatacaggtccatatggagaaggggtttttcaaatagtagaaaaagtagtgagcgataactaccttaatataggaaatttaattcgatctacttttgatgatgctgtagaccggtttcaagatgaaacgataaatcttttgcatattgatggctatcatacgtatgaagctgtttctcacgattataatacatggctaccgaaagtcgcgaaaaacggtattgtattatttcatgatattgaagttagaagtagtgatttcggcgtatataagttttgggatgaggtaaaagcgaagtaccctcattttcaatttgcgcattcatatggactgggagtgttatttccgaagggttgtagtgataagtttgaggaaatacttaaaaataaagaagaaatacaaaatatgtataaataaagatagggcatacatcatttttatgatgtgtgccctattttttatgtagaaaataatggtgtgaattaaaaagcgaagatagttgtaaaaagttttattgcagcaaatattaaaaaagttagtatgggatttttctttgtaaataaagtgaagctttaatacgttcatatcaatttggaattttacagtatttaatttcttacctaagtgctttgcacttactgaattttgagacgggggtcttattggccgaaaatatcgggataaataaaaatacaacattttttatatttttcattgcgaaaaacgtaatctacttttacaatagaaagggttgtgaatatattatactggaaaaataaatcgaaataatatgaaaattttgttttgtcttcgctaattgtatattacatacatgtaagacgacatacgtcatgttatcgacttgtaaggagagaaaaaaatgaaaagtgtaagattaccatcgatgctagaaatcatagttcttttattactatttcttgctgttgtcttttccttccaaacgatttttgatctcccaattcaattagcgctatttatttcatggtttttagtaattgcgcttggattaagattaggatttcgttatcaagaattgcaagatgcaattacgaaagggatttctaacggattagaagcgatactgattttagttgcagtaggtgctttaattggaacatggattgctggtggggtagtaccaacattaatctattatggattagaatttattcaccctagcatattcctattagcaacattaattatttgttctataacttctatcgcaacaggaacgtcttggggaacagtgggaacagcaggtattgctatgatggcgattggtgaaggacttggtttaccacttccgcttgttgctggtgcagttctttcaggagcttatttcggcgacaaattatcaccactttctgatagcacagttcttgcagcttctatggcgaaagtagatgttattgctcacgttcgagctatgctcgtattagatgttccagcttatattattactagtattatgtttactgtagctggttggatgtatggcggcgataatgtagatttgaatcgagtagaatttttaaaagaagctttattaaagcaatttgatattaaaatatggatgcttgttccggcggtcattgttatcgttctattagcgatgaagaaaccgtctatgccaacaattgcaatgggagctttaattggtgcaatttgggcaacccttttccaagggatgaactttggagaggcgattggaacagcttataacggattctcaattcaatctggtgttgagtttgttgacaagttattaaaccgtggtggaattaacggcatgcttggctcagtagccgttattattttcggtttaggatttggtggattacttgaaaaactaggtgttttaaaagtaatcgtatcaaaatttgagaagaaattaaattctgcaggtaatgtaacattgtctacattaatcgtggcattcttagctaatatatttggttgtgcgatgtatgtatcactaattttaacaccaaaaattatggaagatagctatgataaattaaaaatagaccgtcgtgtattagcgcgtaactcagaagtaggtggaacgttaacttcaggtatggttccatggtctgataatggtatttttatggctggtattttaggtgtagcaacgttctcatacgttccgtttatgtggttaagcttcgtatcgttaattttagcagttatttacggatatacaggcaaattcatctggtatgtagatgatgcagataaaggaaagcaagcatcataaaataaaaatcaccttctacaatatgtagaaggtgatttttttattttttaatagcatttgctgaagttatttcattctcatatttagcaattttttgttgtatcttttttaagtttttttcagtgtcttgaatgagctgtaagacattggtctcctgttgtttcattaattctaacctttgaaggatggtagattctccttccatagaccagtcgataaattgttttattttttgaattggcataccagtgttttttaaacacaaaatcatctctaaatatttcagtgcttcttcatcaaaaactcgatctcctttttcgtttctttgcagaaaaggaaacagtccttgtttatcgtaataacgtatttgagaaatagttaagtgttgcattttggcgacttgcccaattgtataatacatatcattcatccttttattaccaaggtataatgccatctttgttaagtattttaccattatagtttgtttcacttaatgcatatttaataataattttagcactttcagtggttgtatggccaccgggggaatttccattaagatccgtagttgtaaaaccaggagttaccccaaatacttctggaccgttagtggcaaattctttactaaaagctaatgttaaagcattaatagctgtttttgaagaattatatcctagtgtattaattggatgtgtttcaccattagcaaacattgttagtgaggccatgtcagttgttacatttattattttactgttgcttgaattctttaataatggcaaaaaggcttgcatcatttggaaagttccaaaaaaattaacttcaaatccttggcgtaaagtttcaatatttaattcactaggtagcatattgaagtctagcgctatgcctgcattattaattaataaatgtaagtgatcagtcgtttcgtaaattttctttgttgcttcttgaatggattgtgaatttgaaatatctacttgaatataggaaacgtttgaaacatttaaagattctacggcttgttgtccaagttgttcattacgagcacctaaaaatacgtgataatctttttctgctaattgacgaacaagttcatatccaattcctttattcgcacctgttataaaagcatattttttcatattgaattcctccagtaatgttatagtaggttacaatggaaaggatacagcctaaacttaagtttaggtcaagaggaatttttttaaataaatatagaatatctatatataagagtgagaattcttatcatttaagagaaagtctgttattataagagatgtaggtattatattttcaaggggatgaaaacatggagtacagaattgaaagagatacattaggagaaataaaagttccagctgataaattatgggcagcacaaacacaacgtagtaaagaaaactttccaattggaacagagcaaatgccgcttgaaattgtaaaagcatttgcaattttaaagaagagtgcagcgcttagcaatcaaaaattaggaaagctatcagaagaaaaagcagaagcaattgtagaagctgcggatgaagtgattgcagggaaatggaatgaacattttccgcttgtcgtatggcaaacaggtagtggtacacagtcaaacatgaatgtgaatgaagtaattgcaaatcgtgggaatcaaattttgaaagagaagggatctgacgtacatattcatccgaatgatgatgtgaacatgtcacaaagttcaaatgatacatttccaacggcgcttcatgtagcttgtgtaatcgcagtagaaaatcacgtattaccagcaattacgaaattaaaagaaactttagcagaaaaagtaactgcatttgaacatattataaaaattggtcgtacacatttacaagatgcaacgccgttaactttagggcaagaaattagcggatggcaccgtatgcttgaaaaaacagagcgtatgattgcagagagcaatacatatatgaaagagttagcaattggtggaactgcggttggaacaggtattaatgctcatcctaaatttggtgagatggtatcagaggaaattagtcaatttacaggtaaacaatttgtttctgcaccaaataagttccatgcattaacgagccatgatgaagttgtatatactcacggtgcattaaaagcattagctgcggatctaatgaagatcgctaacgatgtacgttggcttgcaagtggtccacgtagtggtcttggagaaattattattccagcaaatgaaccgggaagctctattatgccaggtaaagtaaatccaacgcaaagtgaagcgttaacgatggttgtagcgcaagtaatggggaatgatgcaacaatcggatttgctgcgagccaaggtaactttgagttaaatgtatttaaacctgttattgcttataacttcttacaatcagctcacttattagcggatgcaattgtttcgtttaatgacaattgtgcagttggtattgaagcagatgaagaagtaattaatgaaaatgtgaatcgctcactaatgcttgtaacagcgctaaacccacatatcggatatgaaaatgcagcgaaaattgcgaagcatgctcataaagaaggattaactttaaaagaagcagcattgcaatctgggctactaacagaagagcaatttgatgaaattgtagatccaaagaaaatgattgctccaaaagagtaatagaaaaagccagggttcttagtatagaatcttggcttttttgatgttcatttttatgtttcatctacttgcaatactacaagcttcaaaatatattatttgttagcaggcgtattcattactttcatctgtgggcagttctcttttaagagtgaaatgaatttttcttcttctagtggtatgaaagtggtcactgagtcaaataaattgtaatggatttctaattgttgtctagtccatttttttgaatgaagttttttaccagagtatttaacgtgacgaatatcttcaaatggaatttcagtatgaaaaatgaaaccgtgttttacaacaagagatgattccgttacgttgtagtgagagaaatagaatgaagaaagattcacgatatttagcagcatcatgagagtgaaaaaaatagaattttcattttggaagaataacgaaacgaaaaaaataattataaataatgtaatgaaaatgacgtggaatggattttttttcgctttaaatttcaagttagtcacctcggtatacttgttctttaactaaattaaatcataacattgtgataaaacgtgtgaatatgcagaattgcatattcacacgttttattattcatgtaaaatttcttgatgggataaattcaaaagaagttttgtaatagtggagtggcataaagtgacttacaagaatagaaagatagcgttagtcataattagttgtatgatgattatgagtagttgtgctaataaatttgttgacgatagaaatcgaaagcatacatttgtacaagcaagtaaggttttagtagagactgtaaatagaatatataaaaagtaaaggatgttttcttatacgaaagcatcttttttgtagttaaaattgaatactgaagttttgtaatgagtgaataccagttccatattcactaatcgcatatgcgttctgtgccatttacttaacggtaaaccaagggtcttgaagaatattcatgttctattttacatcctataaaatgaatttgtataaacatattcgcttttcgttgtattaaatcctttcgatagatgtttttataaaagtttataaaatgggcaaacgaaacgttgaaatgtttgtttgtgttgtgataagatgatgaagtaataataaacgatatagcgatttgtttggtttttaaacaaacattttgaaggagtgtttagtatgagcgatatttcagagaagttttgggatgcgtcaatagaggaattaaagaaagggtatgtgtttaatgaagaaaaagaggggtacatttgcttagcttgtggtgaaacatttattaaaggtgttatttatcaagataatcaagttttgtatgaagcagagaagttcgtccaattgcatattcaaaatgagcatacgtctatgtttgattatttgctaaatatggataagaaatttactggattaacggatttacaaaagaaaatggttcagtttttctatatgggactgaatgataaagaaattgtaaaagagttggatggcggaagtacatcaacaattcgtaatcatcgatttacactgcgagagaaaatgaagcaagcaaaagtatttttagcgctaatggaattatcagaagaaaaatcaaaagtacaaaccaaatttgtaccaattcatagaacagcaacgatggtggatgatcgatacaatattacggaagaagaaaatgatgaagtattaaaagctcattttacagaagggttagatggacctctctctaaatttccgaagaaacaaaagcgtaaattaattatattgcgtcatttagtgaagaagtttgatagtaataaaaagtatactgaaaaagaagtaaatacagtgatagaaaatgtataccctgatttcgtaacgttaagaagatatttaatcgaatatggatttttagatcgaacagccgatggaagtcaatattgggtgaagttataatcatatgaaaagaaaatgaatagaagcacagtattataacaactatacaaagagatagatattgaaaatagatttttaagaaaaggagaaatgaaatttgaaaccacctgcagataacaataaagaaggtgcggagtcacataagttggaaagtgagagtaaaccaatttggaaatcgatgtcgatgtttttagtaccgttattattaagtaatgtactacaatcagttggacaattatttggtatggtagtagtaggaagatggcttggagttaatgatttagcggccatatcagcattcttcccattatttttcttgctcgtttcatttgtaattggtatcggttcagggagctctattttaattggtcaggcgtttggtgctaaaaacgaagatcgtttaaaagctatcgttggtacgacgctgacatttacctttattattggagttgtgttggcgataataggaagtatttttgcgatggatattatgcgcctaatgggaacgccagaaaatattattgaaataagtgtacattatgcacggattttatttatatcgatgccagtattatttttatatttcgcatatacaacatttatgagaggtacaggagattctaaaacgccattttactttttaattgtaagtacagcactaaatatgattttattaccagttcttatttttggatggttaggagctccgaaattagatgtgtatggagcagcctatgcatctgttatatctacagttattacgtttattgtcttgcttgtgtatttaaagaagaaaaatcacccattacaactagatggcacggttagaaaataccttcgaatggatggggagttattaaagctattgctaaggctcggtataccggcaagtataaatatgatattagtttcattatctgagattgccgtaatcgcatttgtaaatcgttacggttcggatgcaacagctgcttacggcgttgtgaatcaagttgcaagttatgtacaaatgccagcagttagccttggtattacagtttctatttttgcagcacaatcaattggggcgaatcaatttgatcgattgcagaaagttgtgaaggccggaattattatgaactacgtcatcggtggtgtgttaatatctcttatttatttattctcaagagacattttatcactatttttaacgagtcaaactacaattgaaattgctcatagcttagttatgattacgttatggagttatttaattttcggtcatgcacaaattattagtgcgacaatgcgagcgagcggtacagtactttggccaactgttattggagttgtttcaatttggcttgtagaagtacccgtagcatattatctttcttaccatacaagtcttggaatagaaggcatttggatcgggtatccagcagcatttattgtcagcttactattgcagtatgcatattataagctttcatggcaaaagaaacgaattacacgattagttagttaaatagaaaaatgtccctaagttattagacttagggacattttttcgtaagtgcaggtttacaaatagctttttaaagttatatcaaaatgttgtctaatgagtgttttatcactcatataaaactcccacgctttttccggttcaccgataatctcaaaggattcctctgtaatatataaagcgcaattatcctccagtgcaattccttctatattcccttgatgattttgtaaaaaggaatggaaggcgttcattctgtttaattgattataatgtggacaaaatcttttattaacaataccccatccgttactctctatgtaaccagaaccttcataatctgatcggatactagacgtgaaccaacacatagcaccagcgctataaccagcaataagtgttccttgttgcagagccaataataatttttcatcaagtctatgttctttccattgcgtaagcatgtgaatatagtttccgccacctagataaattaaatcggctgaatgaatcatctcctctatttcatacttagaaggtgaatctgttgtaatgcgtaaaatttgtacttcacaatgtaattgtttttcaaacgtgtctaaaaataattttatatagctttcatcatcatgactagccgttggaataaacaatacttttggatactgtttatttgttaattctataaggcgttcattaataggcaagtgatttgaatcttgtaaatcaccgccaccaatgacagctaatttcatagtaaagcaccacctaatcatttttgttatataaaaattcgatagaagagagttacattccttccgtaatgtaatcaataattagaaaatgtagcttaagtatatcggaatagtaaagaaactaccgactatatataccaatacattagaaaccattcattgatatataatatttcatactaatgtttcaaaaaatggaaaaaatatgtttaaatagatgtaatgaagcattcattcatattgaatttatacttatattttaaaagggtatcggaaataatagcgattttctaaaacagtttttacttttaataggaagttgtattacaatatggtaaaattatttcaatatatttgtttaatatgaaatacaaagaaggagcgtgaaaaaagtggattttcgatttgaatttacaacgaagctgaaagaatacttagacgatgagaaggatgaaaaaataataaaagatggacatagagatgtaatttttcactatttatatgcgttagagactgaaattggcgttgttaaaaatcctaattttactttttttgcatcaggaagacgttcacatatagtgttagaaaacgttgaatttaaaacagaagtaaatgtaaaaagtaatataattgaaattacaaaaatagtggataatgtagttattccgttagatactatcgtagcgaaagatcgggaattatttgcacttggacgtaatgaaaagtttagtgtacaaatattagagcagtatctctttgatacatttggagataagttaggcttataatgaatagaatgatgtacgtatttataggtagtgaattttagtttgtattacttgcgtttgacctctcatttaatttgtactacaattcgtagtgtgaaaggagtcatacgatgtttacgcaaaactataggttaaatgagcaaggattaaatcatttctttggaccgcttgaagcgaagattatggagattatttggtctactgaaggtattactattaaagaagtccagcagaaattaagtgaagaatcgcctgtgaattttaatactgttatgacagttatgaacaggttagtagagaaattacacttagaaaaacagactgtgaaaagaagtggcatatatcgtgctatacaaacgaaagaagaattcttatccaatcaaacgaagaaaatgacacaggaattagtgggggaatttggagatttagttataacacatatgatagatgagttagagcaggctgatccgaatttaataaaaaaattagaagacaaattgaatcagttaaaaaaagaggatcgatgaaatgaaatggcaaatgcgtaaaatcgtattgttagcgctcattgttagtaccctctttttcagcttgttattgtattatgttacatatccatttctctttcaaaataaggcattcttcctttcaaagttttgcttgtttcagttagaaaaacatatgaaagaactatcaatggttcgtattataatagcggggttattattaattactgtattgattgtgtgtaaaagaatttggcggcaatttttctatagtaaaaaagtacaaaaagtacttatcccatttattagaaaagggaaacaaatatatatactgccgactgcggaagttgcagcgtttacaattggattattccgtccgaaagttgtcatgtcggaaggtttgcttcagacgttttcagatgaagagattgatgcgattattttccatgaagaatatcatcaaaataattgggatccgctaaaattattttgttttacgttattagcagaaggaatgatgtacatcccgatattaaaagaattgttacaacgatatcatacgtatcaagagttagcagcagataaatatgcgatgcaaaaaatggaatcttcatttgagttaggtagcgcgttattaaaattaattaaaataaagacaatggaaaatcgatgtgttacagcttcatttgcaaaaacagcaataaatttacgaatcgagcaagtgttaaatgaaaaggttgctaagcttactattccgttacatacgaactcggtatatgtaacagtagggttattctgggtgtcgattgtacttattgtcggagagtgcatatagcctcttttttttagggtaaacactactctatgtagtgtggatagagtgttgtcatttatatcattatactttttatcgctatatatatcttatttatcatatattacaggtattttattgtatacaaatcaaatgacgaaaattacagcattctttattcgtctattcggtggatttacaggtttttaaaaatgaggaggaagaaaagtgaagaaactaattgctattatactagtaggtgctctcgcttgggcgggggttaacttttataattcaaagaaagaagaaaaggaaagaaaagcaaagcaagcagagttacaagagaaagaagtattaccacaagtaggttttaaagcacctggcatcacattaaaaggattagacggaaagttgcagtcgttaaatgatgccaagggaaaaccatatattattaatttttgggcatcatggtgtgggccgtgtgaaatggaggcacctgacttagttcatatgtatgataaatataaaaaggatgttgaaatttttgcggtgaatgcaactgttagtgacccagtacaagaagcaagcgcatttgctaatcgctatggatttgagtttccggttctactagatatggacggagtagctggactagattataaagtattctctttaccgacgacattttttgttaataaggatggaattatagtagatcatgtacgaggtgtattaccaccagatcaattagaaaagaaatttaagaaattgattgagagctaaaaggggatttcgtgatgatggagtggatcgtgagattacaacccgtatctcttataattggaagtctatttggatttatgttgatgaaacgaaagatgaggcatcaaaatgcatcatatgaaaaaatgatggatgccgtaacaaatgcgtttattatcatcgtatttgtatggaagtttgcaccagcaattttaaatcctgtatgggcttttaaatcgccattgcaagcattattagctataggaagtatgcaacatattgtagtaggatgcgtaattgctagtgtatacattgtttggaaaagtaaaaaggaacaattttcgcttcgtattttacttgatgcattgccttttggtctgtgtgtaagtattatcttttattttctattacatcatgaagtaggtgtacaaacgacactaccatggggaatgaatatatacgaatctaaatttttgtatcatcctatttttgtatatgagattatcctcaacctttgtataatgggcttgttatggatgaaaaatgaaaggatcggaaatggaaagaatataagtatttttctaattgttgaggggtttgctcaaatcattatttcgcttgttagtgaacaaaattcggtacagtttggtctatcagcacagcaaataatgagcttttgtattattagtttagggattttgttggtgccgaaaaaataaaaaatagccattaacggatattccccgtacatggctattttttattacatatattaaaaaatcggcggagtaacagaaaataagactatcgcatttttctcaaaatgattcacccatttatgctttaaataagcaggtatctttacactgtcgccagtttctaatacgtattcttcctcgtttaaatataatgtgattttcccatctaagacaaatgctaattcttctcctttatgttctagcacattttctgatgaagctgtattaggcgggacggtcataattgctgttgctaaatttccagtgaaatcaggtgaaagcatttcatatgataaattatcgataatcattttctttcgtttatgggaacgtacaattaaatcgtctgtatttgtatcttcaagtaaaaagctaaatgttggcacatcaagagctttagcaagcacttttaatgtttgaatagaagggttagcggacccacgctcaatttgacttaacatagatggtgtaatatcggccatctttgctagttctttactagttaaacctttttcttttctttgtttttcaatttttttaccaatatctatattttccataatgaaaatctccttaagggttattaaattatatttaaataaattaaattaaaattaactaaagttaacgatttgtgttaaactatattaaaattaatttaattataatttattatatggtgagctacaaggatataaggaggaaacaaaatgaaagaaataggggcattacaagcagaatacccattagtgaataaacttattgcaacagaagaagtattttggataaatccaaacatagaaaagtatgaaagggcaataaaagattcaccacttaatgaagagaatgtaaaagatgcggaagagagattaaagcgttttgcaccatatattgcgaaagtttttcctgaaacgaaagggacgaatggcataatcgaatcacctttagtgaaaatatcttctatgaaagaagctttagagacaaattacaagcaacctattttaggagaattattattaaaatgtgatagtcatcttccgatatcaggatcaattaaagctaggggcggcatttatgaagtgttgaaacatgctgaacaactagctttgcagcacggtatgttaacagaagaagatgattattccattttagatagtgatacatgtagagagttttttgccaaatattcaattgcggtcggttcaacaggaaatttagggctaagcattgggattatgagtgcgaaactaggttttaacgtaacggttcatatgtcagcagatgcgaaacaatggaaaaaagatttattaagaagtaaaggtgtaaacgttattgagtatgaagctgattatagtaaagcagtagaagaggggcgtcagcaagcagatgccgatcctagctgttattttgtagatgatgaaaattcccatgatttatttttaggatacgcagtagcagcattgcgattacaaaagcaattagaagagttagaggttgtagtagatgaaaatcatcctttatttgtttatcttccgtgcggagtaggaggaggacctggcggggtagcatttggtttaaagttattgtataaagacaacgtgcactgcttctttgcggagcctacgcactctccatgcatgttactcggtttaatgacaggacttcatgataaaattgctgttcaagatatcgggattgataatgtaacagacgcggacggactagcggtaggaagaccgtctggatttgtcggtaaaacgatggaaccatttttgagtgggaattacacagtaagcgatgaagagttatatagattgttaaaagaactagctgacacggagaatatttatttagagccttctgcactagcaggtatgatagggccagtgaaagtatgtaaagaagatgagtatttacaaaagcaacagttaacagagaaggtgaaaaaaggtactcatattgtgtggggaacgggtggaagtatggttccaaaagatgtaatgaatgaatattataggaaaggtttggagttaacggtataagaaaaatgaggctaattgtagcctcattttttcatgtacataaaaatctttgttattttcacaatagttctttatagtatatataaaggataactaatattgaataaatacaacaaaaaagctttattttacataataagaggatgtgtatacgatgtcattacagactaaatatatagcgggtatttcgcttggggttatgggtgtaggctttgcggcttctatcccttttcaaggaacgatagctggagagattatacaagggggatttgaagctgggttagttggcgggcttgcagattggttcgcagttacagcattattccgtcacccgatgggaattccaattccgcatacagctttgttacctaaaaaccgtaaacgagtaacgaaagggctcatcaatacgttagaaaatgagtggctaacgaaagaaagtattacgaataaagtaaaagaaatgcagctagcacaaatggtgctacaaattgcagagagagaaatgcagtctgatgctgtgaaaaaaggcattgtaacgattgctgagaaggcgattgtttcaatcgatacagaaaaattagcggttattattgaaaaagaattaaagacgtatttacatacaattaatacaaataacattttacaagtgcttgttgatcaattagtagtgcaagaatatgatgaaaagacacttgattacatattagtgaaggtaaaagattggacagcgcaagatgaagctcgttaccagctcggtagcttaggtatgaaggcgatggaaaatataaaagtagatggattcttgcagtttactttgaaatcatttatgaatattgtagatgaagataagattggcggcattttgcagaagtttatcattagtaatattaacagcttacaagaggctgataatagcacaagacaacttatattagcgaagattcgtcaagaaattatcaatgtaaaagaaaatgaagccttattacaggaattagaaaattggaaagaaaagtggattgcgaattggaatgctactgacaaaataaaagagatgctagagcaagtacagcaaagagcagttgcttttgtaaataatgaagaatttgctgataaatatgttattccatttttacaaaaacaaatgaataaaataaaagaagatgaacaaactgttcaaaaaatagagaagtggttacaaaagcaagttgtcacacttgtggaaaagaaccattcgaaaatcggtaagcttgtacaagaaaatcttgataagttagatgataaaacgttaatcgaaatgattgaaaataatgtcggtaaagatttacagtggatccgagtgaacggggcggtttgcggatttatgattggattagtgttagaaggaattaaagcgattatatgagaaaaaccttccgcaattgcggaaggttttttatttttcgagaacactcatattcaaattataagctttctcaatatttaacttgtacgtcccatttccagttttaatcgaatttttataccaatgttcttggttgtttaattctggatgttcttctgaagaagtattttcgtttttcgttaaatcttctacttgttcccaaggtgtacttccatgggtttctttttgattcgttactgctgttaaagatacatcactttcttttgcaagatggacagacactcttgagctttcctgtacaaaccaattattttgcaattgacctggataaagagatagttcgttatttgaagcacggatttccacatttttattttgcggaagaacaagcgttggtttcacctgtggtgctgaattaaataacgtatgctgaacaggtaatgattttaaagtgatatacatcgtttctccagccgtttgaactgaaaggaaatcatctcgttttaaattgagtttttcatttgctttcgttgtcatttcataagttcccaaaagatgaatttgatttgtattatttccctctatcgttagaggctgatgtcctgcatctactacgatttttttgatagattcaggtatatcaaattgtccgtctggaatattactcgtttgcctcgttgtgttaatagaatgacgaacttcttctagtaatccagttgataataaacagtaaaaagcaattccgacacttcctaaaacgccgataaagaaaatactaaaaatatcatatttaataaaagattgctcttttttagagaatagaaggtatagtaaaacttcagctccaagtatgatgagtaaaactggccaccatgcagttagtgtatctaatacttgaattccttttacgactgaaaaaagtaaaaagcatcctaacgatataatagaaagccccattgagaatgttccaacacgccatgttctcattcttttgtaccacctttgttttctttatttccaagtaacaatttaaagccgccgccaattaagagaagtgcaacgatagatgtttggaaatagcgataatatagctcgctaagatgaatgttaaatatagttgcaaagtaatcattcaaaataggaaggactgtttgatctaataaataataaccaccgagtgtaattaacccgataccgatccatctttgatgattgataaaataatcgataatgggttcgtcttgaactcgttcttttccgtattttgctgtttgctgtaacgcatcaaaaaagctatagaaccaaatgattggtactaaaaataaaaacgcagaaagtcttaataagtcgagtaaataaatagatagtaagaaggccgccataagctgaagaccacggcgttgtaagcctaaatacatatgacctgctccagggaacatcgctaaaatagaagcaaatgttttacttttctttccctgctcgcggtgctcttcaaaatcttcgaaaatagtacggtcaattaattgctcgccacgttcttttttctgtagttgctgaacaacgtcaaagaaattataaatccataaaacaggtaacgtaataaggaagataagaaaactttcttgcgatgttaaaagtgcaacgaaaatgatcatacttccgattcctgtgcaagctactaaaaatgtaagtccgcgttgcataagtcctaattggaaatggccaagtccagggatgatggataagagaatgatataaaatcgttcgctctctttagaggaatttatcacttctccagcttcttgctttttcgtttggtttataatggtgataactaaatctagtaagttaattacccatagaacagctagtaaaaatagagaaagaaaagcaatatcacgttctcttactactatggtacaaaatactgcaaaggagaatagaaatagtgatcccccgctatataaaataaaccgtcctagcttttttaagtataaatgtccaagcccaggaattagccctaatacaagtgctaaaaagggatttttattcatgctttgaacctccgtcctttttcgatgtgtctaccgatttgtttacaatttgttgtgaaatagaagactcgttatgttttgaagatttctctaaatttgatgtcgctgtaaaaatatactgaaataaaccacttaccataaaaataattgtagccgcagtcgcaattatgtaatgaatgatcgtgcgctttagtgaggttgtttttatattttcattagactgtagtgtttcaaaattaatttgcgtcataacttcgttcgtaaatgaatcatcatttatcattggaaggttttcatgttgttcatcaatactttccatataaagtgctaaacaatgatcacattcataaagatgttcttccatagattcacgttcattactttctataaaatctaatgtataattgcgccaatcttcttttgaataatgcatcatagaaactcttcctccttccaatgttttttaatccattttcgtgctcgatacagtttcatttcgactgtttttacttcgatgttttcctgtaaagcaatttcttgatagctcttttcttctaagtaatgtgcgagaacaacgtcacggtaattttcgggaagttctcgcagtttttgagcaatgagtaatttttgctctttcgtcaataataaagcctcaatattatgagaggactgtatattttcttcagcttctttacataaggagagttcttcactttctctagctttctttctcttataatcaatagcgtgattggtggcaatacgtgccatccacgtttttaatccgcgaaattgataatttgggagagaggtgtgaatttttacgaatacttcttgtgtaacatctttcgaatcttcttcatgtcttaaaatagaaaagataacttgaaaaatataatgacgatatgtttgtacaaggatacgaaaagcatgctcgcttccttgctgtgctttttcaattaattgtttttcctcaatcggtctctccctcctttttgacgcattctattatatagacgtaaagaatgataagtcaccctacacattttgtaaaaaaagaataatatattttttgcgggagagctagatgaaaaaaggtgtgaaaaaatggtaaagagaagtatataatgagcaagtaggaaatgttacacggagaaaggatgtgaatgttagtagggaaaggtccatactaacaaacatgaaaattaaaatattaatagcagatgataactcttttattagagaaggtatgaaaattattttaaatacatacgaagagtttgaagtagtagatactgtaaatgatggggaagaagctgtagcgtattgtaaaaagcatgaagttgatattgctcttttagatgttcgtatgccaaatatgaacggtgtagaggcgacgaagttcatttgtgaagagacgaaaacaaaaccgcttattttaacgacgtttgatgatgatgaatatattttggatgcagtaaaaaacggagcgaaaggttatttattaaaaaataacgatccggagcgtattcgtgatgcgataaaaggagtatataacggtcaaactgttatgcaagatgttgtcctcgataaaattaagtctaatttaatggaaagtaaagaggaagaatgtaaaattgataagagccttttcacagaaagggagcttagtattatcgcattaattgcaaaaggtttctcaaataaagaaatttcgaaacagctttttatatctgagggaacaattgcaaattatattacgtcagttttagggaaaactggacttgaacatcgcacacaaattgcgatttattacttaacagggaaagtagattaatgatatggaattttggttaactgtaagtaaattaattgtctttttatatattgtgttcagttatatttacgcaaatgtagcaaatttaccgtgggttatatttactttacttatttacctttctgtaaacgtaatgatttctatatttaaaaaagatacgtataaaaaaatattaatctgtatatccattggcgtagttatgttatttacatggagggttcatccattttttattttgtttttatctttgaacttatacgaaattacattctattacatagaaaagaattggccacgctttgtcgttatgatgctcccaattacgattgcagatgaaagtattcgaatgacttatggattaattgttgcattttcttttctcgttttaactattgcagatcgatatatatcgcgtgtagtaaagcttgaatcgcaaaatgataagatgcgaaaagatatgcaacgacttacgaaaagcttacatgaaaataaagagtacataagacaatctgaatacacatttaagctagaagagagaaatcggttatcgcaagaaattcatgataaaattggtcactcgatgacgggtgcacttattcaaatggaggcagcaaagaggttaatggaaatagataaaaaaaaatctgcggagttattacaaaatgcaattcacatttcaaaagatggaattgaaagtattcgcattacattgaaaaatatgaagccaccaactgagcaaattggtattcatcgtatgaaattattcatagaggaatttgccggtaagaatgatgtgaatattcctttcgtttataaagggaacttagatatgatttctccgatacagtggaaaattattggtgaaaatgttatggaggcattaacgaacgcgatgaagtatgctgatgcgacagtcatctcaattgatattcatgtacttaacaagatggtgaaagtacaagtgaaggataacggaaaaggtgcggttctcgttaagaaaggtctcgggattatggggatggaggagcgaacagcgtcagtaaacggaaaaattattgtagatggaacaagtggttttgcagtaacaatgttgttgccgatatgaggatgaatcatctcatatgaaaaaagtgaataatctcatgtgaaaagaatgaacttctgcactgagcaggttcattctttttgtttatactaaaagcagagaaaccgaaataggggtgaaatgatgaatacattagaaattaaaaatttaacgaaaaaatttggtgatttcatcgcagttgataatatgtctttatctattaaagaaggagaaatatttggctttttaggatcgaatggtgctggtaagagtacaacgattaatatgattgctggtttgttaagaagtaatgaaggcgaaattagcatactaggaaaaaatataaagaaacataaccgatttgcgaagatgaatatcggtatcgttccgcaagatattgcgatttatgaagagttaactgcctatgaaaatgtgaaattctttgctgggttgtacggattaagaggagttgagctaaaagcgagagtggaggaagcactgcaatttgtggggcttagcgataaacataaaagttatccgaaaaacttttctggcgggatgaaacgaagattgaatattgcttgtgcaattgcacatagaccgaagttaattattatggatgaaccgacagttggaattgatccgcagtcaagaaactatattcttcagtctgtccggaagttaaatgaaatgggaagcactattatttacacgagccactacatggaagaagtagaagagatttgtacgaaaatcgcaattgtcgaccatggtaaagtgattgcagaaggtacgaaagaacagttaaaagcgattattacagatacgaaagatatttggattgaagtgaagtcagtagaaaatttagatgtagaaaagttaaaagagataaacggtgtgaaagctgttcaaattgaagagaacgtaatcaaggtaaactcggatgcaggattaaataatttaaatcaaattattcagcatttcattaatcatgacattgaaattcgttcgttagaggagcaggctccaaacttagaaacagtatttcttacgttaaccggaagaaacttacgagataaataaaaggtaaatgaagaaaaggtaaagggaggttcatcaattgaacatcttcaatattgcaattatgcatattaaaagagatttcagagacgtaagaactttagtttttatgttagcatttccgattgtacttatgcttgtgttaggaacagcgttaaccaacgcatttaatagtgatagtcattcgattaaagatatacaagtgctatataaagatgaagcgagtagcacgttttctcaatcatttgcagcatttacgaaagaagtggataaatcaggtattcattttaaaaaagcttccggcagtatagatgggaaagaagaagtgaagaaaaataaatatgctgcttatgtagagttaaataaagatggtgcaaaattttacggaagtgacaaaagtagtattgaggggagtattgtggaaggaatgcttacaacatttgttgataagtacaatgtagcggtcgaagttgcaaaagtagatcctactaaggtgagcacagttatttcaaacggaaaccataatgattatataaaagaaacatctttacaagctgcgaaaaaaccaggttctatggattactacgcggttgtaatgacaacgatgattgcactgtatgctgcgatgggagcgagttctttaattcgaggagaacgaatacgtaaaacaggagatcgtctcattgctgcacctataagtaaagctgaaatattcattggaaaagtacttggtagcctagtagcaaatgccctgtgcatattactcgtcatgttatttagtaaatttgtttttcaagcgaattggggcgaccatcttggaatcatatttcttattttattaacacaagtctttctagcaattagcttcggtttaggaatcggatatatcacgaaaacagctgaagcgtctagggcaattattatggttgttgtgcaattagcttctatttttggaggtgcatatttcgtagtagaagaaaatttcgttacgaatttatcgccattaacttgggcaaatacagctgttatgaaaattatttatgcaaatgatgtaggggcagcactaccagtcatttctttaaacattggaatttcagcactctttttattaattgcaattattgcattacgtagacgggaggggctatagtatgaaggatattttatggctcatacaaaaaacgttatctgtgcttttgaaaaataaaaaaagtttactaattataattagcttgccgataatagggacgctcatttccttctcgatatacggaaatgcagggcaaggaacgttaaatatcgggattgtaaataaagaaaatgagccgatagcaaatgatacgataaagtttttagaaggattaaatcatgtgaatgtgagtaaggttaaggagtctcaaatagaagataaactcacttccaaaaaacttgatggagttattacattagattctggtttttcaaaaagtgttcgagaagggaaaccagagcatattgaaatttcatcgattaaaggtgatcaagtaacaggatttataaaatcatatttatataattatattgataatatagcagctattagtaaagtagccggaacagatcaaagcacattcgacaatatgtacgcagggtatcaaaaaagttcatttaaaatgaaaactgagacgctagaagatacttcgaaaaataaagatatgacaaatcaaacgatgggttaccttattatgtttatgctgttttcagcagcgaacttatcaggtcatattttaaaagaaaaagagaatagaacgtactttagactattatcaacgccgatagatgggaagaagtttatattatctaatgtcggagtaaatatcataatactaacagtacaaattttgattacaatcctattcctaacgaatgtttttcatacgaatatcaatatgcctttcatagtgatgatgggcgtactaatgctatttgcattaatcgcaattggaatatcattagtccttgtagctttttcgaaaaactcagcatcggcaaatgcgatgcaaaatatgatcattgtaccaacatgcttacttgctggatgttatttcccatatgacattatgccaagtgcagtacaaaaagtagctaattttcttccgcagcgctggttgttagatacgatatcaaaactgcagcagggaataccattctcggagttgtatttaaacattttaattttattcgctttcgcaattgcattcttcttaattgctatttataagtttggaagaaataatgacgcgagaaattttgtttaatgtgaaaaggtgtggcttaatgccataccttttttgtttgaaacttagagtatcttttgtagtataggaatgcttttgtagagcacttcgttatgtgaagcatgcaaaacatatttatttccctctagaagaaaaacgctatgtagaacagcgttaccgtcaccatgttttgtaagtaaatcaccgacgactttgccgtctgtccatttcagtttggaatgtgaagggacgacttgtaaatattgagttgtttcctctccatctccggcaatgagtgtcgtttcaatatttcttttttgtataataaatctatttgtatttaatatatcgaggaaagggtttttcgttttcatcttactataaggaagaaatgtaatagaagagtcggattttataaataaataatttccgtaatctttacaaggaataacatcttgtaatcctggaaagtaaatgtgtatcgcctcaactttattgattttatgtaagatgcttaagtaacaaatatattgttccatataaaaatgaacgatatttattttagaagaggcatggatagggagactgcctccagtccaataactataatttggtggagatccagcgtttggtgtgcagagtattataagttgattcacatcatttttatattcgtcactttgaacgtaagaacgtccaagaaggccgcccatactatgacaaattaaatttagtttatcgcaacctgtaatctttttagcataagcaatcgtttgtaataaatatttttgtgtagaaagaacaatacgctgccgccagtcataaaaacagatgaacaagtctttatttcgttcgtaccccatactttctagcatcatgatgaatggttcgtaaacaaatgcagaaagtccaaaactccaattaccagtgccgggaataataatattgctcattgaaccgaaaagacctgggataaaaacaataggagtttttccttttctcatattcgtatctcctttaactgttcagtatcaataaaaataagaaatacatttcgtatgaaaacatatttaaatgaaacactacgaaatagtaaggaatatgattggaaggaaaccaaaatgataaaaaaaatattaagagttacttctattattattgctattttcgtttttattttaatttgtatgcatatcgatgttaccttaggtaggaaaatggaagctggaaaaaacatgccgacagagtatgcgcctcattatagtgattttcaattatatgtagaagggaaatcattatatgagcagctatttgaagatattaaaaaagcgaaaagctccatctacacttatttcttcattttgtcggatgataaaagtagtcatacttttttaaacttattaaaagagaaggcaaaagaaggagtaaacgtctatttatcagttgatcgcattaatgatttatcatttgaaagaaagatgataaatgaattacgggaaagtggtgtgcattttacatatagtagaaaacctgcattgccattcggattttattcatttcaccatcgtaatcatcgccgtattacgacgattgatggggagattggctatacaggcggatttaatataggagatgagtacttagggaaagataagcgatttggatattggcgtgattatcatgtacggcttaaaggagaaggagcaaaagatttagaacagcaattcgctttagattggaaacgagatacgaaagaagagataaagaggagtacgaataaagctagtaaagggaatacattacatactatgactagttacaatgggcattacgttgctgaaaaatatatagagctcataaaacaagctcagcactccattgtaattgcaacgccgtattttatagcaaaaaataaagagtccatgaatgctttaatcgcagcacaaaagcgtggtgttacagtaaaaatactttggtcatataaaccagatctacctcttataaaagaagcggcgtatccatacatacgtcaagctgttaataatgggattactgtatatgggtataaaaaaggaatgttccatggcaaattaatgcttattgataatgaattaaccgttattggtacaacaaactttacttcgcgtagcttcaatataaatgatgaaatgaatttttatatttatggtggtcctattgtaggacaagttaataaggcgttaacagaggattttcatgattcgaaagaaatgacgaaagagttttttgaaaagttatctttttgggagcgttgtaaggagaaagtggcgggattggttgagttctatttgtgatgatgaattaggaaagggtgcctacaaaaggcacccttttttggtgggaaatcattacttttcatgcacaagcatcgtaacatcatcattaatcaacgtccccacatgttcacctaaacatatttttttcatgactccaggctcatcaaagttaaagacatgcgttggtaaattgtagtcccgggcaagcagtaatgccgcttgatccatgacttgtatattttgtctaacgacatcattatagtttagtttgctgtacatttttgctgatttgttatgcttcggatcacttgtaaaaacgccatcgacaccctgttttgcgactaatatggcatcgctattcatttcaatagctctttgtacacttggataatctgttgtcacgaacggttgcccgtttccgcctccaaagataacgatatagccgttatctaaatggtggactgcacgtaagcgaatgtatggttcagctactgcattaaatggaatggacgtcataacgcgtacttctctatttgttttacttgttaaaacaccgcgaagcattaagctgttaatgatcgtacctagtgtaccgatattatcagcttctacgcgatcaattccccactcttcagctagatgccccctaaaaatattaccgccaccgatgacgatggatacttcgatacctaaatcaacaatggataaaatttcgtttgcgatatgttctaatcgtttggagttaaagctatttccagtttgatcggcaagtgcaccgccgcttaatttaattaagacacgtttatatggcctcataacaattccccctatatagatcgcaataaaaaaggaacaaaggcgaatgcctttgttcctttttaagaaaatgaaaaagaaaagaagaagataggacgaattgctttgtatagtttttcataacatccactcctcgtatagtatgtttaaacttaatttttttactttcatgagagacctgtaaaataactcttggacgtctcaagatagcccagtacaataccgggctcataccctagaggctgcctaatgaaacgacctgtctaactttcgggggtcacttcataaatgccacgactttttatattaattcgtactaatgcctctcgctgcccaaatgcgatcgatatcagcagcatgttgtccgccatataaaagagcatccgcttgcttaatcgctttcgctccatcactgaatttagagtttggtgttaatgaccagtgtgattgtaaaatgatttttgttgctacatcacggccaaaagcttgtgccatttcgtattggccttgagcccaaatttcaccatcatcatgcacttcattcgttatatctttcggatatactttattcgtatctaatcggcgtaagcatgttggatctgaactagaataagctgtcgcatcccattctccaacacatgctttaccatatccagtagtcgatactgcatcttcatatgtagcacctaagaagtcgccaaatccttctcccatcgctccaccttctgctgaactaccaaagccaggaacttggttatcttgaatcgaatgcccatactcatgtgcgataataccagcatcttctgcatcatcaacaccgccagtaccgaaagttaaagcttttgttgatggagaatagaatgagttatcatcagttgtaccattaacattcacttttatcgaacggttattaatatttttaaaacctagactttgaatgtaacgttgcaatgtgtcgatatgatagtacgacataacatcttcaaagctatcatttgcgcgtgtatagttaaattgtaaattcgtagattttgttttcgcttttgaagaaatcgttacatattctccaattaaaaatcctgttccatctaaaccttttaacgtaacagttttcagttggttcgttagagctgttgaatctgcatcgttattatcttttaagcctactttactaccgctagatacgactgggttaggtaaaaatacttttcctgacccttcagcttttcggtttatatcaacctttttaattaactttccattttctgcatcaataaatgtttcccatgcaccaaatggattattagaatggactacaactttatatactggacgagcaattccttcttcaacaatatatccgaactctttatctgtaggagcccataaattttgctcacttgcttctccaacatacgccattgatttttgtattgcatctttttcactaatttttgtcgttacttccttcacacctgtaacaggctgataatcagaaacagcgagtactccctttccctctccgttaagcgtaactgttatttgttttgaaaatacaggtgcaccattaacaacttgttggaacctaacatatgaagctactgatgtttctgttgtagaaatatattgcaagtctgaaagatctgttttcaatccatactgcgcagcattttcttttaaatattcagttgcttttttctgtggcgaataagcttctaactttacttgctgttgtttttccaatgccgaaaccgtagaaatcgtccccattactaacggcacggtcattgccattgccaccatttttttattaaacatagaaccactccccctaataaagtagctcaaccttatcccattaccactaggcaatcattccccgcaaaacggatggataaaaattgaatctacgagtaattctctatgaacacttctattacctttccatttagggtaagtgaaattttctcaatatttatgtgtaaagtgaacacaatactttagaaagaaatttctaaatccattccttatccctaaagcttttcatattactgtttaaaaaaatagactattttttacctaacggtaggttgaaaaaatcacttgtaagtgatacgatttaaataacctttttttaggaggatctatatgagtaaaagtgaagaaacactctcttcaataatggaagcaagttatcgcctttttgctacgtacggtattgttaaaacaacttatacgatgattggtgaggaggttggtatcgcaaaaccatctatatattactactttaagtctaaagatgctttaattgaatgtatttttactgaattatgtaaagctatgcagttctcttcttatttccatacagaagagtttacaaaatcaaattttattgaaaaatgtattgcaattggccttaaaataattgatgaacagcgaaacgacccttattttaaccgagtgttacaagaatatgtattactatcttcaagaaacaagatgtacaaagatcgattactaactgtgcaaacagaatacttacatggatttgaagtactccttataaaagcaaatgaacttcaattaattgaaaataaaaatctagtttcaaaagctcatatgttagcattagtgcttgataatatcggaaattttatgatgattgatgcaaagatagattataaacaaatttggattgaagctgtaaataacatttttgaaagaaggggttgaagtgaatacaaaaaaacgcattatcggcttagattttgctagagcttgggcgatgtttggtatgctacttgttaatttcatggtgataacaggtgcagaaggaaatggtcccccttttttaataaccttcatgtcactatttgaaggtagagcctctgctttgtttgttatacttgctggcatcggtataactttaatgactaggtcagccgttgctagcaatgaacaaataaaaatttctaatagccgaaagaccatatggaaacgatcacttttcttatttattttaggattactactatatgtaatggagtggactggggatatattacactactatggtgtttaccttttcgttgctgcattactcatgacagtacgcaaaaaactattactttttctttctatcattattttattgttcgcacaatctcttcagcttactttcaatactttcgagggttgggtaggtccaactccatttataaattatgtagacttctggacaataaagggttttcttcgcaacttattctttaatggctatcaccctattttcccttggttctcgttcttcttaatcggtatgttaattggcaggttagatcttcataataaaaaaataaaaaaaagattactcttactcggtattacaatcacaatattgacagaacttttatcaaaaggacttacacacttttttattccatacatcggcagagagaccgccacatttttatttaatacaggacccatcttaccaaatgtattatatattttatctgctacaggatcctctattgctatattaatcatttgcctctatatcgctgaaaaatatagaaataattggtttgtcacttccattgtgcaaacaggacaattaacattaactcattatgtcagtcatgtatttatcggtattgggacattaattctattaaatagaatggaaaatcaatcactactattcgttttattatttgctactgcatttttcattttcagcattttaattagtgtgttatggagaaagaaattttctagaggtcctatcgaatggattatgaggaaattagccggataaatttccatcatacaaaaaggaagttggaattattccaacttccttttcctttaatgagccgcgcttaatttaattcgaactttcgtttcacctaaagaaagttcatcgtcttcgttcgttaagtgaccaaatgtaaattgtttaacgagtaagttttcttccaataaatctttatggttcgttaacgttcgctgtagctctacttctgtatcaagaataacatcgactcgtaaattaactggtaaattcaactgtttacgatattcttgaaccgcacgaatgaattcacgcgctactccttcttgcaacaattcttccgttacattcgtatctaacataactgtatattgtccgttagtcgtattagagaatcctgattttgcaactttctcaactaacacatcttcagcagttacaactacttcttctcctggtgttgcttcgtaaactgctcttcctgttgatacaaagttttgtacttcttcttgtgataattgttttagccaaccattcactgcattcacatttttaccgaatttcggccccgctgttttaaaattaagcttcaattgatatgatgtgtattttgtttcatcgagttcaacatggaatgcttttacatttaactcatccataacgatatcacgataagattcccaatccatatcattctcgttatgctcaagtaatacaagttctgctagcggctgttttacttttaaagaatgctgattacggttacttcttccaagttcaacaacttgtaaaacagcatccatttccgcttctaatttcggttgaagtagtgattcatttacaactggataatcagctaaatgaacgctgcttccttctaaatttagatgaatgtcttccgcgacaaacggtgtaaatggtgcaattaatttactaattgttacaagcacttcatgaagtgtctcatacgcagctgctttctcagcgttcataccagattcccagaaacgattacgtgagcgtcttacataccagttactcacttcatctacaagtgctgcaatttcacgagctgcattcgtaaattgataatcatcaagtgcagttctcacttttttcgttgtactatgcaatcttgataatacccattcgtctaatttcgtaagctttacatcatacgtttctttcggattatactcatctaaatttgcatataaaacgtagaagctatacacattgactaatgtatctacaaatttagatttcgcttccagtactgttctttcagaaaaacgcttcgcattccacggggcactatcaacaagtaaagcccatcttagcgcatctgcaccaaatttatctactaaatcaactggatctagtgcatttcctttgcttttagacattttctgcccttcttcatctaaaacatgccctagtgataacactcgtttatacggtacttttcctgtatatagtgctgatactgctaataaactataaaaccagccgcgtgtttgatcaattccttctgcaataacatccgctggaaactgctcttcaaataactctttattttcaaatgggtaatgatattgtgcaaatggcatagaaccactatcaaaccaaacatcaatcacttctggtgtacgattcattgtgcctccgcatttcccgcagcacacttgtacttcatctacatacggcttatgcaattccaaatcttctggtgtttctttcgtactatactttcttaattcggcaatgctcttcggtgcgaactgatgattgcaactttcacattcccacacgtttaatggtgttccccaatatctatttcggctaatattccaatccaccatattttctaaaaacttaccaaaacgtccatgtttcatatgatccggataccaagtaacagaatcattattttgtaaaaatgtatctttaattgcagttgttcggattaaccaactttctcctgcataataaagtagtggtgaatcacaacgccagcaatgcggatagctatgttcatatttttctttatgatacagtaaaccttccttcgctaaataacgaacgatatccacgtcacaatcttttacaaatttccctttcaaaaatggtactgcttctgtatactcacctttttcatctacaacgtgcaaaaatgacaatccttcactttgaacaactctataatcgtcctctccatatgctggagcaatatgaacaagtcctgtaccactatctcccgttacaaaatctgctgcaataacgcggtaaccatttgtaacttctttcatcggaaatggcgctgtataagatgtgtttaataattcttcgcctttatgaacagataatacttcatagttctcttttaatacttcttgtacacgttctttcgcaacaatgtatacatgactttcttgttttgctttaacgtattccatatttggatggacagcaagcgcaacgtttgctggaagtgtccaaggtgttgtggtccaacctaaaaaatactcattttcactatctttcactttaaacttcacagttgcacttaaatcttttactgttttatacccttgtgcaacctcatgtgagctcaatgaggtttggcagcttgggcagtatggtgaaactctatgtcctttatataacaatcccttttcatggattgtccccaaaatattccatacactttcgatatatggattccttaaagttacatatggatcatccatatctacccaataaccgatgctttcagtgaattcacgccactgcttttcatatgtgaaaacactctctttacacttttgaataaatggttcaatgccatattcttcgatctcatgtttaccagaaataccaagttgcttctcaacacctagttctacaggtaaaccgtgtgtatcccatcctgcttttcttactactttataaccagccatcgttttatatcttgctactaaatctttaattgcccgaccaagtgcatggccgacgtgtggtaaaccgttcgccgttggtggtccttcataaaacacaaacgattgcgcgccttctcgattctgaattgattgttcaaaaatgctttgttcgttccactgcttacgaatacgtgtttctctccctacagctgactcttttacatctactttcttcatctacaatcactcctttgaatgttttaaaagcacacaaaaaacccgcccctatgaagtagggacgggtttacccgcgttactaccctaattctattagctttttcactaatagcgcttagcaacgtactatcatacgtgttctttgtaacggtagacatccgtccgggcttactcactttcagcctcgtctcctcggagatgattttcaaataacttctgcccaccggctttcagcaatataccggctctctggagaacagttcactattttactctttctcgtcttcagatttgtatactttgttaaaagttattttatgccatttagcaactaattgtcaactaattcaaaatatattcttatccttatctcctattcttatacaattacttttcaaattctcgcaatgctgctaaattttcatcatcctcaataagttcaacaaagaatcccgagtcatcctcacgaaggacaatttcaagctcttccttcgcctcttcatttctatttaactgtgctaaataacaagcacgatcatatcttgctaacaaatcacttgcatccattgttaatacttcatttgttattttttctgcctttagtgtttggccggcaccatgatatgaagacgctaaagaaagaagaattactgtttcatttggatgatgtatagaagcattttctaatacttgaattgcctcttcaaacctttcttgactttgatatatttctcctaaagcaagaaatgctctgcttacaaacggtgtttgctctgttaattgtaagataatcttttctgcttttctttcttcccctgctttaaagaatacttgtgcttgcagaagaagagtatcataatcatctggtagttctcgaaccatttgcttcgttaattccaaagcatctcttaacatatcttcttcctcgcactcaacgaaaagatttacaagttgcttcgctacttcataatcccatttattttctagtgacgtgtgcagaatctctattgcttctttattcatctctacattctcataaaatagcgcaaatcgctgtgctgccatactatttttcggatttaactttaaagagatttcatataaatcaattatcatagtaaccattgaaatttctttcgcacgatttttcatacgataaaaagctctcgtaatgatagatcgtttcggctgttcatgcagctggcgttcaatccatatttccgtaaccgcagctgcagcatacatgaatgctgtacttctttctgcttttttcacctttaacgtatgaagaaaatctcgtatgttagacaattttttatgttgctctactgcttttacataaacatcaaatatacgttcattatcaaaatctttttgtattactttcattgcaacttcaattgcttttacatttctttttttcactaatacttttgcataatgatatagaacttctatatgctcaccatctaattgtagcgcgtattcaatctgtgcttgttctttatctatttcattcatcgctccgtacacatatgcaatcgcatctaaacgccatatttcaggtacttcgtctgctaattgctctagttcagtcagcaattcttcctgaagattcatatctactgaaagctgtgctaaatattccatattaatatgcaacggctcttctttcatcgcctgaaccatatgactttgttctttagaacggttttcttctttttcgtatatttccgcaagctgtaaatgtacacctacgaaattcccatcaagctctaaacatgtttcatacgcttgttttgcttccgtcaattgccctaatgccataagtgtttcaccaattcggtaatacggtaatgccgtttccatttgttctatcgccttattatatcttttcatcgcttggccgtactgtccaatagattcatataaaatacctgcataacaaccgtactcacttacttcatttctttctttgtgtaacgttcttaaaaatgctatacctcgttgtacaaattccgttcctttaattcgattcacatattcatctaacgcacttgctacattataatcccttttctttataccattttctaacttagatagtgctactttaaacccttcttcatttccaccaagttcaatttcagcatcccataaaaccattcctgcattcatgaggaaatcttgactcttttcaatttgcttctcaagaccaagaatatattcttttgcttccttatattgttctcttgccatataaacttgtgtaagtccgaagtgagaataaacatcctcatcattttcttctaaagcacgcttatacaatacttctgcttcttccaagctatcattttgaaaatgataatcacctaattttacgtaaagaggtgctttatcatcacaattctcaataccgtttaataaaatttctttcgcactttcctcatccttcaaatcagattcgtatatttccgaaagtttcgtataaatgtaaggtgcattactatccaaatgaatcgctactttaagcccttttattgctaaatataatttccctagttgatgtgcacatctcgctcgttcataccatacatgcgcttcatatttgtactcttttaacaagtcattaaagatttcatatgcttcttcatatctttctaaatctattaatattaaaccgtgatttgttaaagtgaacctttcaggactacgctctaacgcaacttgagagtattgcaatgctttttcagattgatcaatatacatataggataaagctagaaaactccaagcaataggctgatctgcgtctaattgtaacgataaacgaaagcttgaaatcgcttctagataactttcctgttcaaacgcatatcttccgtttattaaatgatataaagcacgattatttttcttctcaacgcttgtcagcatttgctccgctttctctacttcctgaagacgaataaaacactgtgcaccatgcaatttaacaaagtccgagttcggaaacttttccattaacttatcgatacaatataaaataaattctttatctacttcaacatctaagtgctttatcgtatataaccacgtatttggattatcactcgtttcttttaaaaattgtactaggttactaattccctctttgtcatgttcatctaaatgatcagtaagagaaaaaatagatttaaaataacgattttcttcttcacttagaaactctagttgctccttcttttctttcggaacaaacgtgattgctaaacagcctgtataacgatatttttcttgtactttactatattccacaagaactggctctataaagtttggatcttgaacatagaaagcttgcaatgtatcatcatatccagatagaacttgtacgtgtgaagcatgctcaatatctatacttaataaaacaggaattccttcgtcaatcagtctcttataattctcttcattccctttaaaataacgatattcataacctaattcttctaaataagaaacagtatctgaaaacttcgaacctgtcatatcaaaaataaactctgctatttcatcttgtgtacgtttctctccccatatacgcaacgtcatctctaaacttgtcggaacacaataattatccttttgtacaataggaactatcggcaagtgaaccttttttccatccggatttttttctaaattatgatataaagattcttttaaactcttttcttcttttaatagtttttgtaaatctgcaaatttattcattttgtacagcgcttctgcacgtaaatgtacaaagtaagtattataggcatgatatggcagctgagtatttatattatctattaccgctaacatctcttcatattgctctaaatctaataaatactttatcttctcaaaatgaaaatatggtacttgtgggaattttacaatcgcatcattgattaactgtatcgcgcgtttttgttctcctttattcgcatacaattgtgataataaataggtagataactcttcacaatcttcatgctgcatgccagcaataaattgttcttccgctttctcccattcacctgtatgcatataaacgtagccccatttatcaaacactgcgcgcgcactgtactcctctgctttttgcatatacattaacgcttcttcgtttcgtttcatttctaaaagacatcgtactaacgtaaaatatgttttcgctaaaaaatctgcatctatttcttctttacttaactcttctaaagaagattttaacaactgctccgcttcaagaattttccgctcatcaattaactcatcacaatataaagagagcgttctcatatttgggaattttttataagcgtaacgaatgaggaatgaactgtattggtgcataagcccttcatcagtaaggcgaatcaatatatcgaactccttatgcgaaggaatattggcaagccaattcttcacataggataaagtattcgtttcttttatatatgcaatttcattatttatttcctgtaatccatctacaaatctcttgtcttttaaacaagtttctaactgcttaaaatctagcatgcattcacctcgaatttatatttaaactgctacttgcttagattttacacaccatatagtatgtattcaactaaaatctcttataatagatgttattaattaatattattcaaatttataacaaaatatagtaaaaatgattgtttttctccgtattttgtttaattatatggaataacgtaacatgcggttttaatcttgtagaagctgaaattagtacataaaattatatcggcgattttcaaattatatcgaccgattcttaacatatatcagcgattatatgtcgaatatcgacttatcgacattaaacgacaagccttatacatcataccttttaacaaactatgtcaccaaatgtaattttcatattgggagcgtatacaaaagaagaatacacatgaaatattttaaaaaatcgtagttcagcttcatattgagctagcgcattatcatatgttaatcctctggctattaaacgttctacaaattgttgcttatcacccggatcacctgcaatcccctcttcttttaatgattgatacaaatcgtttttatcattgtgatgcatatttgaatctaaaaagttcactttatcgcttactctacattcaatatttttcacacctaattcacttaaatatatcggtattttcatgcctatattgccatctttaccatttctttgcgtatcactttcaaataatttctgcaaaacacctagctgaataaattccgattgtttctccccatctagtaaataagaagccatattagaaatccaatgtggttcaaaacagattatttttccgcctccttttatatacaaaactaaagttctctatataatagccgtattcctacacttttcttaaaatttcaaagcaaaaaagctagtgtatttttaataatacactagctttttatttggaagaaaaatttaacaagtacaatcacaatcaaaacaatccgtacagtctaaatcgtcacaatctgcttttctctttcttttgtttcttttaagataataatacagtagcccaaacaatagtatacaaataacaaaagctattattgcttctgtatacttattttgaatcataaaaccaattccacttccgcctgaaataaaaattagaattaaataaatccagaacatctatgtaaatacctccattactatatatcttaagataatatccatataacactagaggaaatgaataatcccataccattaccgcttaatacaccagtagttattcttagcaaatttgagctacttctccatttccacttttgggtgaacccatcgataagtaacggaatttgagcgaaaaatgatagtatgattgccaaaagaaatgaaggtgtcatataaaaataaattggaaacattaaaataccaataagcatgcctgtacaacgcgcacataaaggtatgtacttttgtagtttaaaaaaactcctatctaatcttctatgacaaggaatttgtaaaataaaagttcgaatcaatatgaatcaccctctctaaaaagattttaattgattttgccaaaaaaatatatattcaataaaaaaacaaaccaggtttatactagacccagtttgtcagtttactactatgttacatctcctcaggtgcctccaccccaagtaaacgtaatccttcttttaatacaaccgtcacagcataaaccaatgcgagtctgctgtctttttcttcgctctcttctaatatacgaacattaccgtaatatttattgaatgattgtgctacatctaatatatatttcgaaataatcgatggctcatttttattgaaagctgcttcaattatttgcgggaatttatttagtaattttacgacactccagctatgatcgtcttttaaagcaaatgtacatgtttcaaattctacactttcttttcttaaaatagaacaagcacgtgcatgtgtgtactgtacgtaaggtcctgtttctccttcaaatttcagcatattttctaatgagaattcgatattatgcatacgctcattttttaaatcgtggaagatgactgcaccaacaccgacttgctttgctacttcttctttctgttttaagtttggatttttctcttcaatattttgttttgcaagttcgattgcttcttcgagtacttcttcaagtaaaataactcttcctttacgtgtcgacattttcttaccatcttttaaaatgaagccaaacggtacgtgttccataccatcaacccaagtatagccaagtttttttaatacggtgaaaaattgattgaaatgtaagctttgttctggaccaacaacatatagcgctttatcaaacccataagtgttttgacgatataaagctgccgttaagtcacgcgttgcataaatcgtcgcaccatctgattttctaattaagcaaggcggcattccttcttcttctaaattaacgactaatgcaccttctgattcttcaagcaactcatgttcttctaaaatcccaataaaatcttccattaaattattataaaatgcttctccctgaaaattagtaaattctacgccgagaagttcatagatgcgagaaaattctttaagggactcatgacggaaccaattccaaagctctaccgcttcttcatcaccttcttctaatttcttaaaccaagcacgtccttcttcttctagttcttcgtcgtcttttacctcttcatggaattggacatataacttaaatagctcacgtattggatcttctttaactactgcttcatttccccattttttataagccgtaattaactttccaaactgtgttccccaatctcctatataattaatccctacaacttcatagccacatttttcagcgatatgtttcagcgaatttcctatcattgtagaacgtaaatgccccatcgaaaaaggtttcgcgatattaggagaggaataatcaattactactgttttttcacagccaaagtggttttgaccgaactcttctttctccgctaaaactgtttttaatactgcatcacttacagtttcacgattgaaaaatacatttacataaggaccaacggcttctactttcgtaaaaaacggattatttaatttctcagcaacttcctttgcgataagagctggtgcttttttatattgcttcgctaatgaaaagcatgggaacgctgcatctccaaattcatcttgtttcggtgtttcaattaaatctaaaatttgtttttgcgttaattcattcgtgaaaatattagataaactttccgcaaactgcattttataatccatgatacaacctccttattttttaaaacacaaaaaactcgtctctaaaaaagagacgagttttaacccgtggtaccacccttgttgttcgttacgaaccactttcccgtttataacgaggacagggggcctcggctttctctactattcgttcaagaagcatctccgaagtgcgcttcatctttttcttccgtactaggctcacaccatccctagctcgctttccttctaaaaaagactactctcttcatcacagacagtatatttaattaattattgcttattatacatcttttcaaacaattagcaagggtgaattacaccaaagtgaaacttagcactttttcttttgtatacataaaaattgtgtttttcaaatctagaactacgaaaataatcttttaaaacgacacgttttctcgccactcgttttgcctccgcaattgtttcatcagtaatatcatgatacaaagcgaagtgttttaatcctttaattccgtcggattctatgacagtttcttcaaacatcggatcaaggtaaacgacatcgtaactattgtcttcacattgcgctaaaaatgaaaaatgctccgtttgctttacttgaattctttgcattgcttcatcaatttcagaaacggatgaagaccatgttttcaaaccattttccataatataagccatatactcattgccttcaagtcctgttacttttccgctttcaccaacaacataactagctacaatactatctgatgccatcccgagcgtacaatctaacactgtcattcctctctctaattgcgtggcttgtacaaacggatcgtgttctccacgcattaaccttttcacacgaaacatcgctgagttcggatgaaagaaaaacgattcttccgtacctttcggataaatagctaatcggttcttccctacgacaagcacatcttgttcatactgctcatgcagcttatgtactggtatgtcattacgtttaacgaatgaacgatttaattctgcggctacctgctttgcataatctgtcatttctttattcgttcttcctgctgttgttacgatcattgtttcacctctatataaagaaaagagggagatttactctcccccttctttagcaattcttttcgaaagcttgttctaagttcgtaataatttcgtccatagttgcaccttcaatttcatgacggtgaatgaagtgaacaacttcttttccttttaataatgccatagatggtgaagatggaggaatttctccgaagtattcacgcatttttgcagtagcatctttatcttgacctgcgaatacagttacaagatgatcaggttgtttttcagcacgaacaaccgcttgacctgctgatggacgtgctaaaccagctgcacaaccacaaacagagtttacaactactaaagttgtacctgatgtattttccataaattctgttacagcttcttctgtagttaactcttcaaacccagaacgcactaactcttggcgcattgggattaccatttggcgcatgtattcttcataagcatttgacatcttgtaatctctccttcaactttcattccaaattcatcatatcacgctctattaataggtgcaaaagaaagataacgatgatttcatttttttgtagggatttcacaaaccccaccgcggcaatgccccactggaacaagttttctattgttagcgatataatcgtatactttacttccaaaaccaagtacgatagatagctttataaaaggaactgcaaaccaataagatggaacggcctttgctaatacatctatgctctgaataccgtcataccacttattatttttaaaaatatacagtctttgttccatcttactttgtagttcttgagaaagctcatacttctcaactacatcttcatttcgaaatgaaacaaatttcatcttaccctttttatctaattttttcgtacgttctgcaacagccgtacacatcggacaccaactatcatagaaaacaatcatacattattcccctttacgtgactccgtcatttgtttccatacagaaccttttgcttcttctccgccttcaatacgctctaatgctagacgtgcttgcatcgctacttcaaactctggatcatcttgcgctgcttttaatgctggaatcgcgctttcatctccaagttcaaataagaacatcgctgcacgccagcgtactaatttacttggatctttcagagatttaatcataacgaacatcgctgccggatcacctacatctgataaacaatctcctgcagtacggcgaacacttacagagcgatctaacaacgctttatataataacggtaatacttcatcaccttttaccatacctaaatacgctgttgctaaacggcgtattgaaactttttcatcatctaacgccatcttcaacactggaatatcttcttcagtaggatccatttgttctaatgctgcaaaacggtttttccagtcagaatctttcatcatctcttctgttactttatatggctcacgcttttggatcgttacttcaacagcacctgcttgatttaataattctttaaccgtttcatttacacgttcttctgaataagcagcaacaatctcttctactacttctttcccgatttcttcaaagttaccgtaacgtgtactttgttccacccatttacgctcttttacaacatttggtgcagacatttgcactttcataattgattctttaaaacgatcaggtaaaccaacacgttcttccgtcgttccatctgttaactttacttgcattggaattgtaaagaacatttgaacaaacactttcacttctccaaaatgagcaagttgttgttcttcactttcttccactacttcttcgccgaaaacagcacgaacttgttgtaataaaactttccagtcatacttcgcatttcgctccactgctaaaaagtcggctacatgatatacacctttaatgccttcaattttcaaaatttcttgcacttgcattggtgcttgttctttattttcatttgtataattattacgtgctcctgatggtaatacttcattcaaaataactttcattgtgtttggacttggcgtcggttcaattgctttaatcttcacgtaaaaaactctcctttattgcatgttcttagctgtattgtaacatgttatcactctatactcctactcggatgcttaattttactactttcttcccactaccatactatttcattctttttacattttaaattaggaacgggattttaaaagctttcgtttccgataatttttattttttatccatttcttgaggcatcgccattatttttgaaaaaaacacgctaaacaaaaaaatataataagctatccatatggatagcttatttacataattttcgttattggaagacaactatttttataaatacaaaaggcagaaaagtatatagattctacaaaatattttgattgtgatacatttacagaatctcttattttataattaatgtcttattattttttggagggaattcgatgaaaaagtttgttttgatatttgggccacaagcagttgggaaaatgacagttggacaagaactagcaaagatgactgatttaaaattatttcataaccatatgacaattgatttattggagccattgtatggattctcttcggaaatgtggcgattaacccatcttttccgaaaggaaatatttcaatcattttcaaagagtgaacattatggaatgatttttacatacgtatgggcgtttaatgaaaagaaagattgggatgatgttgaaagtatatgtaatatttttcgttcccaaggggttgatatttattttgttgaattagaagctgatgtagaagaaagacttcaacgaaataaaacacctcatcgacttgaacataagccaacgaaaagaaagattgaacaatctgaacaaaatttattaagcacatttgaaaattttagattaaattcaaaagaaggagaaattacagagaaaaattatataaggatcaataatacgaatttaaatgctacagaagtagctgaaattataaagaaagaatttcaactatagttttttttaacaaattgaacagttcggattttatgaatatcatatacatttctaattaacataacgtcctattatcggttgcaacaaaaagggattccttactctcagaaggaatccctttttttattttctatcactcgattcatctttttatacattcctatcctgtgatgggttttatggttctcgtttgttactggattagccaaaaaacgttctaaaattttgtatactctttacttattttttcaaaaaagctggcggtatcccctctttaagtttattaaaatactttccacaattttttccgaagctattacttaaaatcaccttttattacgatgccccctcccgccttctctccaaaaaggtaatactctcaatcacaacttcagttctatatattctcttgccttgttcatcatcgtaattactagtctgaatacgccctgtaatcccaacgagcgaccccttcttacaatattcagctacattctcagccgatttgcgccaaacgacacaattaataaaatcgacttgttgttcacctaaactatttcgaaatcctctattcaccgcaacacatattcgtgcataagcgacgccttgttttgtgtagtataattctggctcctttgtcaatctaccgattaatacaactcgattcaatctctgtacttaattatgtgtgtaataacttatttttgttagtattaaaacgttctctttatttctacacattgcttttatgtagaaatagattagaaatatataaacctgtctaaattaattactttttaaacataaaaggtaattaatctatattattataaggataaaacatataacaccatccatatacatagatggtgttatatgtttttataaataggtacaaaatgctctagactggagaaaatcattctattctttatttatataattctttacagtatactagtttcttgtaattcaaaatctaaaattttcttaaattcaccttaattgcttacattccaacaattagttctccttcatttgtaactaaaattttcatttcttttagatttatataagcctgtttttctaataatttatatttttctttaggtagaaattttggccctttgataaaactcgcaggacttgcttttaaattttttaacccctttactacttcaggtactatttttaataaataaggagaatctaatggtgctgcatacctatattctaaaatacgatacacagatttctccatctcctcaagacttctagaccatttcccttcacaaatagcatcacaagatgcatatatgacagcataaaacatagcagaaatattatttttcctttgtaaatcaggcaataaagccccttcctttatcgggtctacatgtttggatatttctattaataaatctctgtaatctccggtatatactccggcctcaataaaatcttccattcctgaaatatattcataggtactagatgggaaatatgtttgccccataaaaagtttatttgtactagagaatctctcaattatcttatcccatccctcccagtgaatattgaaaaagtctaaagtggggatgtacgccatagtaccatcatgttcgtatggtactattatagaaatttcagtgtcactagttgtaaaatgatcccatccagtaatccaaacaaccctttcatattcttcatgtttacgctcattaactacacctatatctaaatccttaatttcagataagaccagccttacgtcggttaatatccttatagcctccataattgttatgtgagttcctgggttatgctttgctttattataggatgtccgaagttggtgaagtgtatgtatagacttagaagaaacacctaactcctctaacccatcaattaactcaaagaaattttccctatttcttctacttttgtatactgcttctttaagaaacaattctattgttgatccaatctctttcaaaaaacttttaacgtcatgttctgtatgatgagtactagaaatacctagagcatttgaatatgattcatttacaatatttaccattatttcgatatgtgttctcatactttcactccttaataattcctttatgtatatgctactttattattaaagtctatatttactatacagactacaatctaacaaactatagtacctcgaaactattctatctatacctcttcatgtatttgatgtcactttttcatttacatcaattccccaatacgaagcgtagaagtcattactagaatctgcattaatcataattataaaaatatggttataagctttaaacaaattcagtgtgaacttaatgatgaattaggttttaattatcaggactattcattaagcctttaatttttaaatacaattgtatccataaaacaaaaaaaacgctattctttttgtagaaatttacagaaaggatggcgtttttgtatgaatctttcgattcaggatgagtttcatttatttgctgaggagctacagcgatatctatatccacatattctttaacaactcgcacaggaaacaagttttgtaaaacggaaaagtaagtatggcgcacgagatttggctgctttatgtatctggattaatcaacaggtagcaagcaattctcttactcgattatgtagccaattttatgcaaatgcaaatacagctacatttaagagtccacaaggacttaattaacgtttatattaccaataaatatcccatgggaaattgttccgatggaacaggttcatgctatctactcaatacgttggcaaatagagattgtatttaaaacatggaaatctcttttgggtatcaatcattgtcacaatattaagcaagagcgtctagaatgtcatctttatggacagttaatcgctatttttctttgttcttccactatgttcaaaatgcgacagctgttactacagaaaaaaccaaaagaattaagtgaatataaagcaatttatatgattcaagatcatctgtacttagtatatggagctatacagaaagacacccaagaaatatcaaaaattcccttcatctgtttgacctctacagaaaaacgaaaaaaatcccatagattcgagaaaaagacagtcttctatattttaggtgtcgtttatcagtgtactgtatccaatctaaagcagaaaactgcataatctttaaaaagacatcatatcaaggcttatttggtatgtgtatttttaaaaacaaataaacaaattatcaagcatgtaggcaacaagaacggaatttcatgaaaaactcaccctcagcttgatgggcatgtatggtgaccccttataacaaacagtccatatattactttattttctcttcatagccccttaacatttcataccccgagaacagtaaatcctttaaatattcatcttctaaaaggttatttaacatctctaaattccctatatttttatatacatgtttcaaatctataagggtttcttcacagtacatttggttaattgaattaatataatctttagtaaccgtcttaaattgttcttcaattaaattttgtgatattacaatgctattcatattacccttagacttcttttccaactccctatccaatactttctttaagtaaaaataaaatccagttctgtctctacacatattaattgatttaatcacatttaaactaaaatccgattcatcaaatgcatacagcgatttataaagaatataaatttcctcaatatccaatagaatttcttcacttaataaagattccattctattgcttgttaaaaaataatcttttaatgttgcaggtaactttattttatttatggtgctattcatacttaatttatcatccttctataatattagaatccattctaatattatagactacacgactcgccgtgactatagtctacatgtttaaagattaaaaaatgtacttatgacactatcttaatttatatctttactctgaatcatgactaaaaacatttattcattttcatactaactaatttaatactgacatctatcctataattcttttattagtaaaatatagttttattcttttttgcagactatagtctgtagagttaaagaaatacctcttccaaaattatcttataaatattgggagagtggtttcttgagtattgaacaaacttttggtaatgtcttgcaggagtatcgtcttaattcaaaaatgagccaagaagaattagcgtttaactctggattagacagaacttatatcagtcttttagaaagaggaaaaagaaaaccaacaataaacactttatttgcattagctagagccttaaaagttaatccgtcacagttaattaaagaactagaagaaaaattatcaaatccaaaaatataaaaagaaacaaaagaaaatactttaagtgttttcttttgtttgcctataacatttaaagaataataaaatagtttgatttcagaaggacgaattattaaaataactcctattctacctaaataaacgtagtaagaactatgaaagaatagttaaattaattaaaacaaatctttcattttttcatctttatattcgtctaatactttatactttatttcagttttttcatttatccagcccacgaaccattcttctttccgactacgttcagatatcttttccatatagaaatcccatacaattgctagtttatttaattctaaatactcttctaaataatctgctctaaataacaagtttctttcataccctaaatactgtgcatcaaagacaaccatattttcagtcttgtctttccataccccctcagaaacttgaactagttcaaaaaacttcactaaatcaacatttggtaaaagataactgcatgaagttttttctccagaaacagaatttatatttgcctcccaggaatattcccaaactgaatcttcacactttatattttcaaattcattttcataatacatattcgaaaaagctgggtgccaataatgttcaaatgcaaatatatcatacgtatttttccaggaaacacttatatcttctttattcatagactttaaagcgatgtaattttctttatctttaagcggcaagaaaactgcctttgtctttataaaaaactcatccctatcaatgaagttttttccgttatccctttcttgattaatcaattgtgctaaagatatatatctatgtcccttatactcaataaatatgaaattaccgagacatttaaactcctctctattttgggcccaaattttatttggcttatacggtaaataagattttattaaattacgcgtatttttttctggtgggtgatctaataaactgggatcaatattccttaaagacgactcccatggttcatttatttccttattaacaggatagttatcttttaatttcgctagtatttcatataacgcaatccactggtactttttaccgatacgttctactagattttcgtgcctattatagtatcttagatttttatcataattaccatgcaccttttcgtcatatccatattcaataattctcattatagcgatattacttaaatcttgatcatcaaattgatccttccagttatacacttcacgtccaaaaacatatcttccaaaatctccataagccccaatacctcttccatattccgttgtcatagatttaattattgaatcaaatccacaatacccttttcctgatatttgttgcatttcttttaacttgatatctatttcttgtaatgaatatgtttttttataccagctactcgaatatggaggatttattttttcgtatttttcaaggttaataactcctttatttacagcaaataaaataatgcttcttgcataatctctaattaatacgttcggataaacttcatcttgtaaaaagatattagtataaataacgtcaactatttcaactaattgcggtactttatttattcttaaaatcgctccatataagctgatcaataacctttccagaacatatggatcatttacatcaaaaaaccttttaagatcctttaaaataattgaaggttctttcatatatattcttattaatgcagtagtagaaatatctcgcagttttttgtcagtacatgtaaacaaccaaataaaagttgtagataacaattcaaaatttccatactcgaaatgttgaaaacttaaattttgttttaaaagaatctctgcaagtcgcgtaggtacttctgaattaccatttatagatattgtccaacttccatctcttgtaggcatagacatcttgtaaagattctcatgtaaaaattctgcgtttaacggtgattctataatataagactgttttaacaacctttcgtatactaagctttgtaaatctatatctttttgtcttaaacatagatttacccattcaaaggttttgtcatttatattttgtacgtctctccatgaaatccctcgaacgaacgcttctgctatattaaaagttatacgctcaaagtcaattaaatctagccattctacttttaatttttctggaataattattgatagactctcataaactccataataaaatgagttatcagatgacaatatattttcaaataagtttttgtcttgttgatatctttctaataaaactagggatatatatatatctgcaaatctctcataagtaaaataaactaggctttcaccataactcctttcattaattgataaaatgttttcttctgctaaacctaaaagtatttctcgatacccaatagtatatggctttgctacattctctattacttcataaagccgctctaattcaatgtcatacctctcactctcaataaattccgaggcgatttctttcaaaattttatctactaaatttagtgaatttacatatgaaaatcttttatcaagtgatagcctaccattaaccttattaatatatttttctaatacttgaactatactccaacctcggaatccaacatactcttcttgaattgcttcacaataaatttgtaagaataggggattataacactcgttttctaaagaagggaatattaccggatttatcttataaaaattaaaaaatgggtccaacgcttccaaacttagattattaaatcccttatgctctaatttatacaacggaaaatcttcttcaatattttcaggtaatatgcttctcagataattactcctaactgataacacgacagcaatattttcaaattctttaataaaatttaaaaaattcatcaaatagcttttccaaaaatgtttaccttctccttcatttaaagcatctattataattacagtttgtttatttttcttctgtgctctgtcattaaattctttaaaaaaggactctttagaacctttgtaatcaatcaaatcaaatagttgtttataaggatgatcatgtgtatttaaatgttgacctaaaaataagaaaacactatgcccaacttcttgcaatcttttagcattgtctgccaataaatgtgatttcccaattcctgcatctccataaatcaatagatacggattgttaattaattgaggttttatcaaatacatataatcattcattgctctttcatgtttggttatttgattgattaaattaatgacttcatttctaatgttttttttagtttcttcattaatcttatatcttaattcctcaacttcttccataaagctattgatttcttctttaaagctcttcaaattattttctaaataaaaccctttatcattataattaatattctttaaatagtttaaaatctcttcaataaaagaaagattcttaaattctatatcttccttatacgtatctaaaaccacatttaaattcataatactatcttgaaacttattaattaacacagtgaacttttcaaaaattagcttgtcacttactaatgaatcaaatacaacatttagatccgtttctacattcgcttctgaattataccttttacctaaatctaatatatttcgatcaagtatttgttctaaatactcatccgtatatttttctaggtaagccctttgttgaatttcatataaatttttttcaaagtattcttttagactgttattactttcaacaatactattttgaacatttgccaaaatactcatttcatttactttaaaacttttgtccctatatccttcaagatatacaatcaactcattaagatattgtgttacaatcggatgagtttctatctcttctagcttcacagattttctataattatttatttcattcattgctatttgggataattgctctacaaaagcatctttagtaaccgttctatatgtagctccaaatacataattaaatatcaaaagcccattcttttcttcattcaaaaacttttgaaatgtatttgaatcaacaaatgtgttttcaaattgcttttgaaatgattttatcttttttagtttgtatttaatcttccatttttcgatgaaagaagtagtcagcaaccctattattttacttattataggttttagaataaatgtaaacttaagcaattttttcactcacacctttttaaattatatttttatgtacctttaaagcggttgccacccatacttaacgacaaaaagacgaattcgttttgaaaaagtttaatcaaaatgaattcgtttctttttggatggactccccttttataaaaaagttaaatcaaaacacacttagaattctttaattgaaagaggcaaactgtcaaaacttattttaaggccacactactcacattatttttcatattcattcacaccaatagagccactattatgtgaaagttctcttggaagagttttaaaaaaactttttactttcttagcatttgtcttattacaataaattacttttcttgttgaaaaacgcatctgatattcattatagaatcttaagtcattcctactaagtttaaaaatagaattatcaggattttcatacgggaagtttttctctctaagaatcaatagatgtttaggtgaaattggcaaacaaaattcattgaacgattgcattgtttttccgctggcgtgtttaatatttaccactggattatctgaaataaccaattcatccatcaccacaactttggattccatttcctcaaattcctctacaactccaagaaaccaatcaaatctatcacttagaagataatatcctaccctatttaaaatcccagaggctaagtgcatcaatagtttttcattatcatccatcttaacttcagcaaaatcaggtatattttccgcaagcatatcgctaaagttttcacttaattctctgaaagcaggaactctaatgctttgtaaagctatgaagaatactaaatctatcctatcctcttcatctaatatttctcttagactacaatttaacaaatttgtttgatcgtttaatttttcattaatttccctaaagcatctagcaaattgagactctaatacagaaaaatgctcttctaaaaattgcttgtcaaaaaaacgagaatcaacagatccgttagcaactttctgttgactttccaaaaactcctcagaaaaatcataaaaatatttttgttgtgcaacattatcaacatgcatattagataagtttttttccaaaactttatcataataatctaccttatcttcatttgcaaaatacttaagataaaaccttggtacataatgctgttttttaaccattccctcacctgttttctaagaaattttaataatctttatatattcattatatcatgttagaattttttagtgattcttataaacaatgcaacgattattaaatactacatatgaataaagaatagcagtataacatcatgctaccatttgtataattaattatttgaattcgcatgattattaatcatttttacatttgatcttaactaatagcaccctttaacgaaaaaaaattccaattaatttttcgttgttttgaatgtgaattagaaattttaatcgtttgccttactataccccaattcctatccaaccgtattttttttgtttactttcaatatgataacgtgaataggccccccccacagttaccacgtttgaaattataggtataaacatggtaggaacagctaaatagtaaaaccaattatctactttttcccacttatccaacttagagatctccttatttgctttcaatatatctgatctgattttttctgctaacttaatatctccattgttcattaaatttttccattcaattaatacctctctaaaccttttaatctcctttttttctcttaaccttaacaaatcatcaattgattctattctaggaatatattgtatttcatccttcatttgaactaaacatagtttatatacttcatgcatattatcaccttctgtttcgttcgatgtacatgatactctttttgaaataaatggtaccttaaattcttcagacattttcataagagagattattgatgataattcaaactccatatcaagcatgtcaaccacaaaaccaggatagctttcttctctttttaataggctatatatataatcaacaggattacctgtatccaaaagtctttctaatggtaaatgtgtgtaattaacagcttcttcatgaagccctatcctccataaattgataaaatcaaatagtccatctacatattttttggctaatcccctttgctcctttaaatgtggctgtcttttttgaaagtgtttaactaaatgatttattaataaaggttttatgttttctcctaactgaatgtcgttataatccacagtattttccacatcgttcaaatacctagattgcctaacaatcccctcgaattttaatttttctagtacagcaaattcacatggatcattcaaatatactttatcaaataatagtattaactctaaacacttcttttctaacaatccatactctctattacttttaaacttatttattaaatctctgtctaattcaccattttcttcaaattctacatatccatttttataagcgtttttaatcaaggcatttgaaaaatgtctgtctaagataattccattatgattttcggccatatttttccatcctcttcgtaaatatgctttaatttgtttggagtaattcatttcataataaactcgattttagtataaaactttttattaaatgttatttttagatagcagcctgcttaatttagaatgccaaaactttaatacctccatcattttaacatatatatccatatcaaaaagggggcaacggtgtatttttttataagcagtcaaatttttttcaaatggttaaattttattttaaatccatatattaaacaactattatattctaaaaggaattcgtgattcgtaaacatttgtatatacagactcttcacgccgaacataaatctctctaaacaactctatcgatatgcaaaaaatcccccttgttaaggattcttcattctctgatatatatcggtgctgcaaagtttttagagttactgtctatagaaacaccagcactatattaagaggtgcactagtgtactgatattatttcctaactcatccgtttgtctaaataacaatttctttatctatgtatgaaaatatcaagggactgatacttatcaatagtatcgcctttttcaaaagatactccctaatttgaacaagttttaaactaatcttagtttcatattctttcaattcttcttcaattttggccgtgtccaattcaaacaacctactaatctacacattagaatacatattagccattttaatttcactaaaatgtttccgtttttataacagtactgttcaatatctcacactaaaacacaacaaaccaacaaatagttttaaacactgaccaaacgaaaattatatctcattaattatttatacttaataaatgttctttaaatattttgaagctcttccactgtaataattcacttacgattatgccggcaaaattttttgggtttttctccccattttgaatctccgttactaatatacaatcatactttgcaggttccattatttttaattgtttaaagacattaatattatgcttttgtctgttagttaattctgtgcctactccacgtataatatcatcaagacccgattcataatgttcatattgatttctagcagccacaattaaatcaagtatacgtaattcttccactcctcgagctggattattccacatgatgtaattatcattatgcattataatcgtgccccttttatttttatccctttgaaaagatatgtcataaggattaccatgaacagtagatatagcttgtttagcaatgtgtagcaaagcaccagaaagaacattgattgaattctctttagccttaaattctaacttaagttttgctagtctacctagcattttttctttttcaatggatgccgatgtagacttatctttagcttcatatatctcgtaatcctctgttaatcctgcaatttctccccatgttaattgtgcttctttttccttctcttttattttcttttccaaaagttcaatattgtttttgtctttcgtaataatatttatgagttctgaaaccgcaaattcaatagattttaaatatgtttccaatttaaacttctccttcactaattgagcttaacctaacatttccagcatccatagatgtctgtaaatacatttaatcactatggttataagtgtatccataccaagcaacatcttcttgctgaaaaacacatatttcatctgggtctaaataatgattatagcttcttagattcatagatctgtactcttgaccttcattatttaagttaaaagctggcgcattttcttgttgctatttttcatcagcccttcttttatacgtataataaccagcataagctcctatgcaaacaccgataagtcccgtcatagtaagctccgaataaaaaagattttatattatttatatagcctttttatcttttaaattctgtatacatcctattgaattatatcaaaatcaggaaattaattgtatatttgaaataaagtttgatcaaaaacacctctcaaaccagcatttcacaatagataaaaagcattcatttcgaaaaaagattaatcaaaatgaatgctttttaaatcacttcctaattttctttattattttatttccatttggaaagtagtaatttatttttgaattctcttcaaaaaacctttctttaatttgcgccaacatattatctttagaaacttttccaggacttaaaataaattcacctgaattccccattaaaagtatactccacccatcttttaccccctcataatattcagggtgctcgctcttaatttcttctagtttttcttcctcttccatagttaactcatctggatttacatatgcatgaatgaaataatccttttgttcttccctaactaatcttccatagtcatttatttcaaagagccaaaatttagatctagatgtttcaaaatttagtatccggtttacctctttagtaccaaatggtggttttctaactgaattaaacagtcctaaagtggaatgaacttgagtcgcctcttgagcacctaaaccagaaaatccatttcctgcactacctatccatttagttctttgatttagctcttttccttcgactctttctctcgtaatttcaaataaatcttgttttactagaggccagaggctactaactatatcatagtcttcatattcttgtggccatttgtcaacataaatcattatcggaattgaatcgtgtcgcaataaatcatgcacatcaaatgtattacataacttaaaacttttactttcaataataattgattcatgtgttacctcaatatgatcagctgacattagtttacttaaataaagaattctttctttagaacttaatctcttaaaactaatattgtttctaatttttaatgtgttagaatttacaaaatcaaagagttgcgttggttcccccagatattcagacaaattaggtaacataaaattattgttttcattttccgataaaatggaataatcaacaaagtcaagaataaacgtggacaatttagaaaaagcataatttaaaatattatccttttgagtattttccattttatgagtatcaaaatattcatcaattttatctaacaaatcttttgcaactcttccttcaaggctttgaatatccttcactaactcatctgaaattgtggtaattgcatttctgtctacagataataaaggacgtttatccccaaaaaagtctatataaatcgaactcgaattattatattccctactataacgataattacttatattctctattattttggtatcactaactactattccatcaaccattatacctgtacttctacttaaaacaggataaacatttaacaaatcagatatattttcttggatattttgcgaaggcaacgccagcggaatttcaaattttatatactttgactccacttctacattaataaaattaacattttcgtatatttgttgaagtttaaccaatttttcaagataacctttattatatctgccatcgtaaatagctttacttaccttttcaaaatctatttttcttaaatcaacaggatgattatttcccattaatttttcagttgcattattatcaaatttaatatatataggaattaacttgttaggactagctaccatctcatatatcttataataaagattatcagaaatatcctttctatatttctctttgtctaactgagccagaaacatagtttcttcaatattttcaatatacttgttatttaatacaagatcatcttgaagataaatttttattaacgttccattacttcctataacttctctatccgcatcttccatatatctataatagaataattcatggggaccgtttatcataaaacttatatactcatcctgtttagaatatgatgattttgtacaaacctcaatctcatttcctaacataaagcaagataaaataccgattccaaattgagaagtaggcttaaaatcagtattccataaagcctgtttttgttgaaattcatttgacttgtaaaaagaatttcctatttttaaaaagtacctctcaataatgtcttttgtcattccaataccgttatccatgcaatataagtacttacgtccatctctaccttcattaattccaaattcgattctaccttcagtaatatccttatttgccaatgcacagcggcatgcatctaatgcattttgatatagttctcttaaacataagtattggtccttatatagacccacccccattaacaactcgattattttaacttgatccaatgtaaatttcatattagggacaggctgaaatttttctgaattataatcaatcccgcttctatttacattatgcgcaagttgcaagtcataaatttgactatcggctttctgattaatatctgacgacatactacctaagaatagatagtaattcgcaatctctttatctatccaatttaaataatcttgaagaaaataatagagttttggattttcaaaataaccggaaaatgatatctctctttgaccttttgcattaaaatccgttaaccaataatctaccccttcttgcttaaccttccaatgtaataaactaatttgattatcaatcattttagatgcctgaagagacttaggcgccctctcatagctaaaatgtattacatccgccaatctcaacattactgttaagaatttgatattagcataatttccatttacgtatctgcttttcacttcataattattgacttctgaataatctaatccatgccctaagcaaatttttgctaaatcctctgcgagcttcccgccccatgttcctcctaaagaatcttgaaatttcgaagttagattcttgcaattcttttccgaaaaaatatgatggttaattcgaataaattcatatcttaagttgaggctctctcttttatattctttgagatctcttatttctctaagtgaacttttgtacccagacctaaaaacctgataattgcgcacctttttagccaagttcgatataaaatcttcttcgttattctcaataaatatataattttttatttttgcaaaatcaccgtaaatagtttgagtattctctaaaataaaatctttagcttcaatgatagaaaaaggtttctttaaatcactattcaaattcatatccaagtcttcatcatataaaggaaattcatgactcccttcaatcattttaaataatttcacttcccattcaggcattgccataccagtatcatgcatatatgccgataatcctaacaaaaagaattcatatccagtaaactggtttgctttattttgagcatctattaaaacaagcatattttgcaagattttttctgaatgtgaaccatcatgaatatcaaaatcaggcaatgtactagtaatatttttcaaatgattaactatatctggtttcagcttttcatatagaacagctaatttttcattatcgtttccattatcttttccatcttttaaaatatcaataaaattcatcttgtcctccactttataattagtttactaaattgaaaattcttgaaatctttctaatatatttttattgagtataaccacgattttaggaaaaatttgtttccttatctttattttagaaaacatcctctttcatgtccatttattgaaaaaaaagatggtacaaaatgtattatatataagtaccgtcaatcattaccttatgctatttattcaaatttatttttcttacctttgtttaaatatcttcctaaaatatacaaaatgtatattcaaattaactgctttattaaaaaagtgacacgtttattaatcaaaaagagatatgaattccttatttagtttactcgataaaatgtaagcactttaaatactatttacaggctacggaaatcatctaaaagtgattctttaagttggcgtttattaatctccacaatcttttccgatttagtattaacaacagagctgttcaaatccaaaaattcatctgctttcaaattgaatatgttctgtagagcttccttaactacagaatcagcttcttctcccactttcattaaatttctaagctttggatttgtaacagaaccatttataaacatctgataaattgtttcttgttgtaactttattttcttttcaagaattgcaataagtgcattttttttaattaatttgtcctttaactcacttaattctttctgtaatacactatagttctgttgacttatctttaattctctttggtaaggaagaagttgtttcaatagttgttttgaatccttaacattctgttgtacaatatcctctatccttggtaaatttacttgaatctgattattttgcgctaatgttttatgaacaacagtattatattcctcaattaattgaaatccccttctttctgatcgaacccaataattatcagatatctcttcatttagccaaggaagccccccttccatataaaggattttcgcatatttacttaaagcaatcttgggaacttcagatttaattcctttctgttttacaaaactcaatataatttttcttatttcatcctctggatattcttttttctttcttcctacctttcccatgttacaaccaaccttcataagttttataaaatttatcgatattctgtaataaatccctcaattgttttgaatttattgctaattcccttgttagattgggatttattttattataagtatcgctaactaatttcagatgtagattaagcaatgttttatataaggtgagcacttcctcttgactctctttcatccatctttcgataaattcccttttttctaaaaattcatcatactcaattctccaatattcgaagcaccggaaacactgtgttttacaatcctttattagtgctgtacaatagccaatctcaagcttgtcccactcctgtttcgaagtttttgctggtgaaaatataaatctttctctaaataattttccaatatgccctgccttgcgtgaactcccattaaaaaaaactgaattttttaacggttgacctgtaagactaaacattttaataagtttagatatccctgaatctgtaagaaaaaactcatgttgttgatagtgacgttgtgagtatattgtatcgtgtccccctaagcgagctatctcaataggatggaacccttgtatcattaaggataaaaatgcaagatgtctagtatcattaggtcttactcggcgttcaaaatcaaagtttaccccattaattctgccctgccttatttctttttccgagtcttctccaatgcttctaactgtaaaattatatggtggtgcagtaattaccttatcataaaactcatgaagaagatccctgaaaatattacatctgaatatatcaggatttctacgtaatatcggttcatttaatatccccttatgtgctctataagataagagagtttcagaatagccgaattcctctgtcatttctacatattctttaaccatggaataaatctttttcgaaatttccaattcatcaattactttttttccaccttgccccctattttttattctaggtaatttgagatagtatctatcatcttttatatatatacaattcctctttaaaagaagaaactctccaattcttattggaattactgatgtcaaatgccaccaaatacgtattggataataatatatatatctctgactatcactatttgtttttataaaaaaatcatttaaaacccatgcaaatttaaggaaatccttaacagtaggaataactcttgttcttggcttaacagacggaatagttgacaaaaaattcagatacccttcttttccttcaaaattatcatagtaattataaaagttaaaaatagctgaagctatagtagctcttactgtttctcctttggacaatattctttgagtaaaatcttctaataatgctattctaaatatatttgtttttatcacttcatctagtacatacttgaaaatagcacttacagtactgaattgatacttaactaataaattagctgcccaacatttcattactattgttaatttttctacttctgatacagaacatccactcaattcttctattaatctactgaaacgaagataaaacatattatctctttcttcatcatataatttccatacattttcgtaaaaattaatttctgtaaacttatttttttctatagtttctaagttttcgatagaaagttccatgctaagttctaattcaaatgcttcatcacttaattcttcaatctcaattatttcactcatgttttctcacctcacctctttgtggaatatatcgtgtaatagaaggtaattgtattaagagagactcaaattcctttttactcatataaaaaaactcatatataacggatccaaactttatttcagcttctttaaacaactttaaatcctttaaaaaaagaattgcatttctttcaaaatctcctttgtatccattcttttcagtatctctaatgaaaaagctgatatgtttgagaatgcgttcagtaatcccggataacgcataaaaattataaatagcaaaaggacaacttatacaattctctcgttctgtatacaaacaattgtctgatgacaataaacactgtacatgtcttgttttagaatgcaacattcccatgtcaagttcattaataatacgacgaatttcctctccatcaaggtctttaataaggctttccacagcgcgttcttgctttgtaagatataataaagcatctgctatcccttctaattttaaatcttttccaaacttatcataaataatgttaatttgatgggttctttcatcaatattttgtgtggatccaaacaaaatgttagcaaatccatctgctataaatccaaaataatctctagtaaaaatttgagtactcagaaaatttatatcttgttgatttatatgaatgtatatatttgtggtttcaatcgacttatgattacgaaggaattttaaaagttctaattcatgcgcaggacctttttgacttttaattaaattataggcaagtgttataaaagttctattcatttttaatgatgaaaatttaaggttttcatctggaaatgtatcaaaaaaagccttataaggataactagtgagctgccgatttttagattgaaaatcaattaacgaatcacttaaaggattaagaattcttgctcttatttcacataaaactgctgcatatgcaataggaaggattaattgctccgaacaataaaaataacgatttgcaccagttttagaatgctttaaattcttaatttgaatcttccttattattttcttggcatcttcaatacttaactcatgattctgaatccactctatactgtcaacaatacctgttccctcaaaatttattctaggaatttgcatacagtcccaatgtctccaagcattatttaaatgtaccaatgtatacaaccaaactgattcatagcgattataaaaggcatttcttgaattattttgtaaagactttaataacacttcttttacgctacttacagctttttctttatgaatatctagattagaaatatatttaaaaaactccataaattcttctaccgtataaatttgcggcgctttcttcttcttactccttctcttatacggactatttatgttactaattgtaaacattttcttttgtaaagcatatccctccatttgatcaatttcccttaaaaatatataaagtatttttttcactttttctttggtattattattaaaaaacatcaaattaagctctttagaggagtacataaataactccttatcaataatcctctcagttaagaccctcgtaacagaaagatactctaacaaccttgcatttttcgaaacaaaattcgaccctgagtaagattctgatttaagccttataaatttaaaccacaatctctctgtttctttacaaaaaccagaaaattccacatcttccgcatttaatctgtacataaaattatcatatatagaccccctatcaagataaaggtttaaatttttattccgtcgctcatattctttaataatgtcctcttttaaatataaatatctaccattaaaatatctaggaattcccctcattaataaaggtatctccattgtctgtatacttatccgaataacatccacgtttatattaaattcattcaaaatttcctgtctagtatagtactttaaccttagctccttatccatttcctctttttccttttttaatgaaaaaatttcttcttttctaaaaaaaacatgtctccctattttctgactgatttttaacaatccttcttctagaagttttttataggtatacacgtttaaatccaataatttaagaacatcattcaatattattaaatccttgttcgatatatttaatcttattttctctcctaatgttttacttctatacttcaaaaaatttctaatatccttcttattgcaaaatgtgaactccctttttcttataaattgtatctttcttatattaaaactattgattacaaatatcgcttgagtatacccaatacctgccatcttcataaattcatttatcgtcacatatttttccaaaacatcaattacttcacgctttctcacatagcgtttcgcatacctatattcctcttgattattcaaggtgaataatgggtatttcagtgttcttaagtatatttgaccttctttagaaagagaaacaaggtttttataatatgcatttaataaagatctgttgtcaaggttttttagtcctacgtacgcccaaaattgctttgtagtaaaatattctttgctaaattttctttcccattgcatatgtttgtttaaatcttctctatgaataaaaaccttttcattcttatattcaactctaataatatttttttctacaagaaaccttagactgttttctgttagcttgtatttcaaatgattcaactcaatatattcttgaaccactatttaatcccccccaattactaatataccgatcatatacctgtctcttattaaaagagtcctcataaaaaccaatatcatccataccctcaccatatacactagaaagaacatttacgtgttcttgtaccttactataagaagttctcttctcgatatattccaatgttgcagttaacgttctatccccccttagattagcaatctcctcaatactcagacctaaatcaataagaaaattggtaaaaacacctctacctatatgcgtggaccaaggaagacctgttaaaaattccaaatcctcgtaacggcgatttattctcagtttttccaaaaaacgttccttgattcttaaaaatcgcttagcatatccagtaccacttaaagctagtcccgtacttttagaaataaataacgccttactttcattacttttaaattgttttttcagcttttctaatcgttctatatgaatgtgataagcctgccatagtttctcatcatctaaaacaaatacttctctaggtctcttgacttgcacatcatacctagatgataagtgcttgaataaatgttcttgattatcttctattactaaccacatcccatcatttcccctaaatcctttttcgtagatagattctcttgtcaaattataaatgctaacttaaatatgtacattaacgcttgaataaatatgtacattttcaattggattctccatactgactagtatctcatataactagatactcacgggtttataggtaaatccctttcctaaaaaacctaactttatcatacgaggaggtagaaataaatgtcctggaaaaatgattgctggagttctcagaaaaagcattgttgtgatgattggtggaaatctaaagaaaagcatcattgtgatgataattggagttctcagaaaaagcattgtaatgatgattggtggaaatctaaagaaaagtgtcattgtgatgacgattggagttctcaggaaaaacattgtaatgatgattggtggaaatctaaagaaaagtgtcatcgtgatgatgattggagttctaaacgaaataagtgtcgttgtaaatgtttctttatttgttgccattgtaaaaggaaaaattggtaatattttcgatgccaacttaaaggaaagaatatgtcttttggaaccgataaatactagaatgtattatacaaaaagctgactgaatataatcagctttttatcaatgaacacgtaaagatttcaacagacatatgtctttactgattaggtgggctattaagaaaaaacaagctaactcttataaatcgatttttaattacttcacgtacgtataaagctttagatgccctcattacttcagacgaattcaccagtattttcagcaaaaaattcatggaatctttaattagtcgagtactttcattgccttcagaaaccccagagacaagcggggtttcttttatttaaataaagattttgtttaaactttacaaaactcacctatattaaaatatcttctaaaatccttattgaacatttataatactattaaacggtttaaattcgacaatcagtaatggaggcattttaatgggaaacatcccaaaagtatcatcacaccaatcaaatcctaatataccctcacagcaagtgaatcctaatacccaacaaggtagtataaaaaaaacaagacgccgtattataactactttggcttttatattacctataatttttgtccttcaatattctctgaataaccaacaagaaatgattaaagaaaaacaaatcacacttaatacggaacaacaaaaattatcttctgtaaagaaggatggtcattcccttaacaaggatgtcaaggctttaacaagtagtgaagaagaaattttaaaattcgcaaggaaactgtatggattttccaaaccgaatgaaactatatttcaaataactgaataaaattacacggcattacctaaaaggcgatttgaagataatcgcctttttatatttaatttctaaaggaatcatactaatctctctttctatcatataactactttgtttaatttgttaaaataaaaccgcttgtccgtttcactttgctctatcattacatttactattagtaatacgatttttagaggtgataaataatggacgagtttttatcttttgctgcacttaatcccggttctattggacctacacttccaactgttcaaccttttcaattccctaccggtcccaccggttctacaggagctactggattaaccggatcaactggaccgactgggccaaccggatcaaccggatcaaccggaccaactggatcaactggatcaactggatcaactggatcaactggaccaaccggatcaactggatcaactggaccaactggaccaactggatttaatcttcctgctggacctgcatctattaccttgacttctaacgaaaccacagcatgtgtatccactcaaggaaataatactttatttttttcgggtcaagtattagtaaacggtattcctactccaggggtagtggtcagtttttcgtttagtaacccatctcttgctttcatggttcctcttgctgtcattaccaatgcctcaggtaactttaccgctgtatttctagccgctaatgggcctggaacagtaaccgttactgcttcacttcttgattctcctggaacaatggctagcgtcattattaccattgtgaattgtccgtaatgattttatttttaagaactaagcaatttctaataaaaagagcactgattttatagtgctctttttttatcatttggatgtgcctttcaaattaaatttcgtaacagcctattaaaataacgcttttattgaatttcatccttaacaaaatttaattactccaatgaataaacatgccacagtatcgtattttaataaaaactataaaacagacatacttaacactaatagtagaatttttcttcttcatcaaattcacttcttttctttttataaacataaaaaaggatctctatttatacagagatcctttctaactttataatttactagactgtaacccctgaataaacggaactacttcaggatttacaagcgatgataaatcacctaactcttttcctaagtaagctgctttaataacacggcgcattactttagagttacgtgttttcggtaaatcttctacaacgtggatatctttaggacacaacgcttttccaatatgagagtttactaaactcattaattctttctttaattctcctgtgaatgttacatgatctcttaatactacaaaacaatgacaaacttcaccttttacttcgtcaggtacaccaattgcagcagcttcaattacatcgttatgtttcacaagaatagattcatattcagcaggtccaatacgtttacctgcaatatttaacgtatcgtctgaacgccctgtgatgatatattgttcaccatcgtaaatgacccagtcaccgtggacccatttattttcaaaacgtgaccaatatgtgttcacgtaacgttcatcatcttcccagaagcttttcgtcatacctacccaaggtttctctaagcataattctccgacttcatctcgaattggtttaccttgatcatccagtacgacagctgccattcctggtaaagatgcgttaaaactaatcggtgcgattggcttaataagaacattaccgaaaatcccaccagagatttcagttccacctgagtagttacagattggaacatttccttttccaactgtttcaaacagccacatccatggatcaggattccaaggttctcctgttgatgcgaatacttccaaactctttaaagaatgtttattgacatactcatcaccttttgccattaatgctcggattaacgttggcgaaatacctagatgagtaatttcatatttatcaactgtctcccataaccggtctgcttctgggaagtctggaacaccttcgtacataaccatcgttgctccattaatgagtgaaccgaataatagaaatggccccatcatccagcccatatcagttacccataatacacgatcaccttgtttaatattcattccaaatcctgcatcaaaggctgctttcaaaggaaatcctgcatgcgtgtgtactgttcctttcggcttaccagtcgttcctgatgtataaatgagcattaatggatcatcgctttgcatttcttcggcatgtatgaatggtttttctttttctagcgtactccacgaaaagtcatagttatgtggtgtaaaatcatttcctgcatgacgaacgattaccactttttcaacagttgggcaatgttcacaagctttatctacttcatcttttaaagaaacaattttacctcggcgtgaaaatccatctgcggtaataatcatttttgaacctgccgcttgcacacgtgtcataactgcatcagacgcaaagcctgagaatattggtgaaataattgctccaattttcattacagctagcatcgcaacaactgtttctggaatcattggcatataaattgttacacggtcacctttttcaatacccgcgtgtttcaaaccattggcaacacggcttacccagttatcaagctcttcatatgtaaatgattttgaagttccattttccccttcatactgaagtgctggctgtattctcgtctcttcatccgcaagccagcgggataaagctgattctacaacgttacatgttccaccattataccactgtgcaaacggtgtaccattttctaaatctaatacttctgtataaggtttcatccattgatagccaactgctttttctgcctctccccaaaaccaagctgtttcctcaatagatttattataaaaagtttcataatcttcatatcccaatgatttcatccaaccatataaacgtgttttttccttgtactcttctgttggaaaccaaactgcttgtttcaatgttttcccctccttaactttttgagcaagaaagccctaaatagggcttttaaactggatatacaggatgtttacgatccgtgaatacttgatatttactcatatacatttcgaaacgtccttttaactcttcacgtaaattgtttggatgaacaataccatcaatcaccatctctgatgctaaatgataaatatcaatatctttcttatactcttcacgtttttcagcaatgaagctagcacgctcttcttctggtaaagctgcaattttatttgcatatacagcattaaccgcagcttctggacccattaccgcaatagaggctgtcggtaatgccagacagcaatctggttcaaatgccggacctgccatcgcatataaaccagcgccatatgctttacgaacaacgatagaaatcttcggtacagttgcttcactcattgcagaaatcatttttgcaccgtggcgaataataccggcacgctctacttttgtaccgatcataaatcctggtacatccgcaaggaataataatggaatatgatatgcatcgcataaattaataaacttagcagctttatcagctgaatcgtggaataatacgccacccttcatacgcggctgatttgcaataataccaactggcttaccatcaatacgtgctaagcctgtaattagctcttgagcaaataatttttttacttcatagaatgaaccctcatcaataactctattaatgagatctttcatattgaaaggagcattttgattttctggaatgatttgttctaacgttttatcgaattgtttcggttcttgaggtgtaaccaatggagtcttttctaaatagttgtttggaaaatatgaaatgtattgtcttgcttgtgtaatcgcatcttcttctgtcttacataaaacatctccgcatcctgatacagagcaatgcatacgagctccgcccatctcttctaaagttaccttctcaccgataaccatctcagccatacgaggagatcctaaatacatagatgcatttccctctaccatcattacaacgtcacaaaaggctggaatatacgcaccaccagctgcagaaggtccaaataacaagcatacttgaggaactttacctgataacttcacttgattatagaagattcttcctgcaccgcggcgccctgggaacatttctacttgatctgtaatacgcgctccagcagagtcgactaaataaaataacggaacacgtagtttttcagctgtttcttgaatacgtaaaatcttttcaactgtgcgtgatccccatgatccagcttttacagtagaatcattggccattacacacgcagtacgaccatgtattttacccgttgccgttacaacgccatccgcaggtaagcctgtttgttcacagttagcaaataatgcatcttctacatattcgccattatcaaatagaagcgctaaacggtctcgaacgaataattttccttttgctttattttgctcatgatatttcggtgccccgccttgtttaattgtttcaactcgttcttcaaatgaattagattgttgtttttggtctaacatatttactcccccttatacatcggtttgcgtttttctttgaatgcctgtaatccttctattcgatctttcgtatggattacaccttcatacgcttgtttttccatttgtaatccggtatgtaaatcaacttgaataccatttgaaattgcctcttttgctaatcgaacagcaataggtccattactagcaattttctctgctatttcaatcgctttctcttcaagtaaattagctggtacaacaaattctactaaaccgtattcttttgcttcttgcgctgaaatacgtctacctgtataaattaattctttcgctctaccaacaccaattaatctcggtaagcgctgtgtaccacctgctcctggtataattgcaagtgtcgtttcagtaagaccaagacttgcagattcagcagcaattctaaaatcacaagctaaacttaattccgtaccaccaccaagtgcaattccatttatagcagcaataactggctgtggtaattgttcaaccatctccatagtagtgcgaatcatactaacagcatggcgaacttgttcttcattcataccggcacgctcttttaaatctgcaccagcacaaaatgctttttcaccagcaccagtcaaaataactacacgtacgtttgaatcttcacttatttgagttaatatcgtttgtagttcatctaataatgccaaagataatgagtttgcttgtcttgcacgatttaacgaaatctttactacgtgaggtgttacataatcaactgaaatgttttgtaattgtagcatcttctcacctacttatcgttttatgttgaagcgctctatacacatgactcggtaattggatattcaacttactttgaataaattgactagctctcaataacttttcttcgtctatattcgtttggactcctaatttatggagcatatgtactaggtcatcagtggcaacattacctgatgctcctggtgcataagggcagcccccgagtccaccacaagaactatcaaacgttgtaataccgtattctaatgatttaactacattcgctagagccattccatacgtattatgaaaatgcatggcaaactgcgaagcatcatacttctttaatagatgttctaatacttgttctacttgtaatggattcgctacaccgattgtatccccaagagaaacttcataaatgccgtatgaaaatagttgattacataattcgtcaactgctgcgacacttatatccccttcataaggacatccaaatacagtagaaacatagcctcttacctttttcccttcgaataatgcctgttttgttatatcttcaattacaactaatgcttctttaatcgatttattaatattacttttattatgagattcacttgctgataaaaaaacattcacctcatctacattttgcaaaaaagctcgttccaaaccattttgattcggaacaagcgcagcatatgtaacatttggatccctttttagctcagaaaatacatcatttgcatccgctaatgcagggacccattttgggtgaacgaatgaggaaacttcaacatacgacaatcctgcttctgtaagtagttgaatccattttactttatcttttgtgccaacaatctttttttcattttgtaagccatcacgtggcccgacttctttaatgacagcaaaattaggtagtttcaattcgcttccccctatatctccctattcaatttctaataatacatctccttcatttacaaaatcgccttcttgcacattaattttcataactgtgccagcttcttctgaaatgattggaatttccattttcatagattccaaaatgacgacatcctgctcttcctctactgtatctcctactcctacaacaatcttccaaacgtttcctgccatcgatgcgtatactttcgtcatcattttttcccccttaatattgttaaatcttattttttaacgagttgtttcgttacaaagcctgttgtataaataccctctttgaacacttcgtcttccaaaacttgcagtagcattggcgtgttcgttttaataccttctacttttaattcttctagagcatcatgtaatttcgaaattgcttcttcacgagtctccccatgtgcaatgactttcgcaatcattggatcatagaaaggtgtaatcgttacatgattttctaagaagtgatcaatccgtacatttgacggtaatgttaaatctgtaattttcccaggtgatgggaagaatgttttcggatcctctgcataaatacgagcttcaatggcatgaccactacgttttacatcatcctgagtaaatgatagtttctctccacttgcaatcagaagttgttgttctacaaggtctaatcccgtaatttcttctgtcactggatgctctacttgtaatctcgtattcatctctaagaaatagaagttcttctgatcatctacaagaaactcaactgtacctgcatttgtatagccaagtgctttggcagcttgtacagcaacttctcccatcgcctttcgtgtaccttcatctaaaaatggtgaaggtgcttcttcgattactttttgatttcggcgctgtaccgaacattcacgctcccataaatacactgtgttaccatgtgtatctgctaaaagctgaatttcaatatgatgcgcgtctgctatatatcgctctaaatacatttctccgttaccgaagaagttttgcgctcttgttttattactttcaaacgctttggtgagcgtttgctcagtttccatcaactgcataccaatgcctccgccgcctgcggatgccttaagcattaatggataaccaatttgttttgcaatttcaattgcttcttcagcagtttcaatatttgtagtaatacctgggactactgggacatctgctgcttgcattgcgatacgtgattcgattttacttcccatcttcgtaatgatttcttctgaaggaccgataaatacgataccttcttctttgcaacgaaccggaaaagacggattctctgataataaaccataacccggatgaatcgcttctgcatttgtcttcttagctatttcaataattttttcaaggtttaaataactttcttgaacacgcggtccacctactaagtaagcttcatttgccatcttcacatgaagggcattttcatctgcttcagaataaatagcaacagtgcgtatgccaagtttttgacaagttttcataatacgaacagcaatttccccgcgattcgcaattaatattttttgaaacatagtgattcctcccttttatctacatcctaaatgtctagcaattacgagacgttgaatttcagaagttccttcaccaatttctaatagtttcgcatcacgaatatgtcgttcaacttcatattcacgcatataaccatatccaccatgaatctgtactgcttgattcgcaatacggcttgctgcttccgatgcaaatagttttgccattgccgcttctttgccgaaaggtttatcattatcttttaaccaagctgctttatgtactaaattgcgtgctagctctacttcagtcgccatatcagctaatttaaattgaatcgcttggaaattagagattgactttccaaattgttgacgttctttcgcatattgcaatgcacgttcaaaggctgattgcgcaataccaactgccaatgctgcgattgaaatacgtcctccatcaagtgtatataaaaattgtttaaaacctttatttacatcaccaagaatattttctttcggtacacgaacaccatcaagtacgatttcacaagtattagaagcgcgaacgcccattttatcgtaaggactagaaatcgttaatccttcactagtagtaggtacgataaatgctgaaatgcgttttctaccattctcttcaacaccgttgacagcggttacaataatggtatttgcatactctgcgtttgtaatccaacacttctcaccactgattacatactcatcgccatctagtaccgctttcgtttgagtaccacctgcatctgatccagcattcggctccgttaatccgaaggcacctaatgttttacctgacgccattggaactaaatacttttgtttttgttcttctgtaccgaaataataaattggagaagcacctaatgaaattgttgcagcatagcttaaaccagtgccaccacaagcgcgaccaatttcttcaactgctaacgcatacgatacagtatcgccacctgaacctccatactcttctgggaatgggatgcctaataatcctagttcgcccattttttgaaatgtttcatatggaaactctgcagttttgtcataatatacagctttcggtgcgatttccttttcagcaaagtcacgtaccatttctttaatcatttgtttttcgcgagttagagtaaattccattccgctacacaccccttatcgaatattgagtttcgacagcgtgcgagtttctactacaaacataacaacttaaaagacaagaatattagttagacaattgctataattctgtcataacttaattttaaaacagattctgtactaatgcacaaaaaaattcctacattgttctacaacaacataggagattttgtgtcgaattatgtaatttattgtttaataatctctaccttttcccgaatcagaaatttctactaatgcttcagggtatggttcgaaatacgtttgtcttaataaatacttttcatcaaatcgaatggcccatgattttagaattgtaagtaaactactaagtggtattttcttttctgcatacttttgtaacagttctataaaatgatctttttcttgtttttttagctttgttttaaagtatccaaaaatgtgctcgcatacatttacattcgatgtatagcggggggtgcgcataaataattcatataaagtcttctcatagttttcaaatacaacttcaatcttttcatttttgtgatttgcaattatacgccctaattccttttgtttcacttgattatatgccataaataaatatttattgtccgactgaaacgatacaaggtctttcatatttttattatgtttaatcattttgtaatatgcgattgtaaatagtcttgtaaagaaatgctctctaataataaaattcgacaatctgccttcctcttcaataggaagatgcgaaaatttttttactactgctccgccaaataagcccgatccttttccctttgctggcgctttttcaaaaccagaataaattttcacatcacgcgtaccacaacttggtgaacgattctttaaaataaaaccatccacatccgatatcgtttgtaaaaagtcatttgaaaactgctccattttttcagttacatcttctcgtgtcgacagttgcacaagtctgttctcaccattttcttctacaattcgtatcgtttcacgaggagttcccaatccaatctccacttctggacaaacaggtataaatgtaacaaatggctgcaaatttcgtattgttacatctggaatcatctctccattatatcgacaagcatcaaattctaaacatttacttacgacgattgtaggttttgcaaattgccgcatctcattacctccttagtgctagtccgtatactataaattgtactaggattaacattttaagcaaagtttgattcatttatttttatgagaaatatatatccaataatatattaacaatcattcaactctattttcaataaatgtgcgccctattatactggtttagatattgtgaaatgaataatacacagatgctccggagaaattaatgattaagaaaggagggaattgttatgaaaaagaaattatcatctattttaagtgttttagcactctctattatgtttttaggtacatctgcgcaagctgaatacgatggaaataatatgaatagagtgaataacactgatatttcaactcgagtaaatgacaataatttagacagagttaataatgatgtaagaactcgaaatgtaaatacaacaaatgatttaaatgataatcgtgatagaaataataattgggcttggcttggtttattaggactagcaggattattaggtcttagaagaagagacaaagaaacacgctgatttagaatgtttttaataaacaagtacttatttatcaaaaatatataacgaaaataaatcgcctttttaaaggcgatttatttttacttaaaaagtaatatatgtaattcacacttcgacgattaaattcgtggagttaatccatacaatataaattgaatcgtattttcaatttctgcttcatcattccatttttcttcaggtaataataaaaatcgtgttaataataaacctaatacagctgataaagtaagacgtagtacggaagatggtggtatctcaataatctctccttcttcttgaaatttcacaatcaactttttgaaatgtgaaaacagttctgtttctactaattgctgtatttcattttttagttctggttgaaatggtacttcttgaattaatatttttatcataggaaagtgtttttgagcaaatttaaatctattatgaattacaactcttaaaagtccttcatacgattcatactctgatttaaatatttcttttgcaaaggtttgtacgaaaaatggtgcaacgaacttagttaaagttggcattacgaccgctagtaataaatcttttttcgtcttatagtagcggaagatggttccttccgctacaccagcacgctttgcaatttcacttgttgaagttgaagcgtatcctttttctccaaacatatcaacagccgcctctaatattcgcatttgacgttcatttcgtttatccgtattagttgcagctattaattcctccagccaatccttctgcatttataaagctcctttttgtcattattatattttgcgatgtttctttaaagcaaatacatttcctactgcaaataatagtgaaaaaagtaataatacagtaagatctaatgcaatctctgtaaacccttgattccgaatcatcacttgtctcattgcgtcagcgccgtatgtgagtggaaatactttccctaacatttgtagccacttattcatagattccattggaaacaatccagaaaagaagatttgtggcacaataacaagcggtataaattgaatcatttgaaattcattatttgcgtatgccgataaaaacgtacctaatgttagtgcagttaaagagagcatacatgtaataagtagcgttagccatatggagccagctacgtataaatctaaaatataaacggaaaagcttacgataataatggattgtataaaggcaaagattccaaaaccaataatataacctgcgactatttcccatcttcttactggggtggataataacctttctagcgtaccacttaaacgttctcttacgaaagatacacctgataatataaatacaaagaaaaatgtaaagaaaccaattaatacaggaccaagcccatcaaacatcgtaaagtctttagagccatgtaaataatttacttcaggtttcataatcgatacatcattcttctctgtgcttttttgcaatacttgaagtacagcacgattttttgacgaatcactaccttccaacagaagtttcatttttccattctctattcgaaatactgcatctaccttttgtttttccaactcagaaatcgccttttccttactgtattcataaattgacgcttcttgatttttcatcacttttactatttgagcgggcatatcaacaacagcaatttgcggtatatagtctttctgtgtaaacactagtgacaaaagccaaagtaataacatcggcgctccaaacatcattgctaacgaacgcttatctcgaaaaaattgacgaataatacgtataattacaccagtaactctcatgatggcaccacctcttctagcaaaaagacatcttcaatccgtccagatgaaacgcgttttttcaattcttcagttgttccaaccgcaactagtttcccttctctaattaaccctagacgctcacaaaattcagcttcatccataatgtgcgtcgttacaataatcgttgtgcctttctttttaagatcataaaatttttcccaaatcgtttttctaagaagcggatctatccccactgtaggctcatctaaaattaatatttctggttcgtgaaggagcgctattgctaatgataagcgttttttcattccgcctgaaaattgttgtacttgctttttcatatactgtgacaattgtacaagttcaaaaacctctgcaattcttgtctttttacgttttccctttagtccatacatcgttgctataaaatctgcattttcatatgctgacaattcttcgtataatgcatccgcctgggccatataaccaattcttttcatttcatttaaattaggcatattagtattattaacaagcacttcacctttcgttgcctcattaatacctgcaatcattttaatgagcgttgttttccccgatccagaaggtccaacaaaaccaaaaatttctgctttttcaacttgcaatgaaagattgtgtaacacttctttttttccaaaactttttgatacagtccgtaaaataatggaaggttgttgcacatttcatcctccttttccaataaaatgagtgagtactcacttttattttacccttgcttaattatatgtcaaacttcattgattagtatgtatgtttaatcaacgatattaaacaatgaaacagagtcgacattagaatttcatttcctaaagtcgactctgtttcatttaaactataaatttcactttacgtttttaaattcatatacttccgaattctagcaacatctaaagaatattcaataactaattgctgtaacggtaaaataactgtgtcaggatataaatgtgcatattgtaatgtttctgcatatttttctaaccttttttctaaatactttattatttgatcaggatgacttactaataaacatttacaataataatgtatttgttcctcaatcgccgtgtattcttcaatttcatattctttatgcatgtgtacacccctttaagttttttacatgaattacttatcacaattttcactcgacaaattttaagttttttgattatttacactataacaaacaatcagggtcaaattttgttactttatgtaacgtagaaaatttttaacaaaattgtaatgttaactcctgcaaaatacataaaatctctttactcacttttgtataaaaaaatcgtacagcttaatttaactgcacgactacaatctctggcctattcaaaattctttgcggaatgatactatttcctaatcctctactcactaccattgatgtaacatgcccggttctgttctaatagtatcatataacattaaagccgaaattcctaagttaaggaaattcggctttttgagttcgcatgaatatcttagttttagttctatgtaccttgcagttgtagatcttagtacataccagttgtctatctatatgtgatgagttttttatctttttcaataatcaactatgtataaaatatttaacttaattaatccccttaatggatatcatgctttttaaagttaccgccttgtacttccgcaacatcatatacagtgacaaaggcattttcatcaatttcatgaataagttccttcattttattctcttctaaacgactgataacacagctaacttctttataagcttctttcgaaaagccaccatacatttcattatagattgcatttctcccaagacgttcccaaattgtatctatcattaatttaggttcttttgtaacaattttaaatgttttagagccacttaatcctacttcaataatatgaattgctttagaagcaataaagtacgcaatcgctgataaaattccaccctgaagaccgaatactgttgacacaaaaataaatacgaacatatttaaaaacaagataagatcacttgtgccaaacggtaatcttctagacaacaataccgctaacatatcaattccatctaacgccccaccattacgaagtgccaatcccataccaaagccaataatcacaccaccaacaacagtaactagcaatgtatctccttcaataattgtaggcacattatgcataatcacagtacctattgcaagtgatacaataccaataactgaataaattgcaaatcctctaccgatttgtttataacctaaccaaacaaatggaatattaataaatccaattaaaagacctaatggcaacccaaataactgagaactaacgatacttatacctgttacaccaccatctgagacattattaggaataagtacagcctctaatccatacgcggttataaatgctccaataacaattaaaattgcttgcgagattctttttaatttattaacatttttagtccttatacttcccatctcaattcctcatttctcacatttttctctttttgtcattttataattacatcagcttctttaatcttagtgttacaccctactatgtaacttctctcaaactataacttcctatacttaatccgaagggtatacggtatatgtatggattcttataactactaatcatgcgttaccctattaaatacgttatccactttgccatttaaacaccatgaaattattgttaatagaccgcacacagaaactactggctgttccacctcccaagagtttaaattatttccgtccacttacctatcacacagtatcaaaaccgtagttcatgaaatcaattccataaacatactgagtgctactttacaagtctcaaaatagcactaactgaccaatatactcattcagtcaattataatatacctaaaactaaagtgaaattccattaattaatattctttctctttattaaaacaagatacataatgtaggattgtttaagttttttataaaataagtaagttttataaacactctagttttcaatgtttttatgatgtgaaaactatttaaattacgcttaatcgagagtaatttattcaatatattctttcttttcactcttgtattttatcttcattcgtgtattatatgatgcaagaatcttcacatagaagaaaacttttaacaacgaggtgtatcatatggagacaaaaaataatgttacaattggttcctacgtacaatttccctatcgtaataactccaccttacaattaacaggttgtgtagttaatatcttacaaaatacgattgtagttgatattgctgaaattgctgaaacacatgctattgaagaaactaggcaagttgtaaaacatggttattataaagtgaaactttaatcagccctcaccaatcgggcttttacgggcagcagggccccacctaacttcttttctttcgttgaattttgaggtggggtcttactgcatggcaaatagcaagattaaaagatgaagtaaatcggtaacataaaaaagacactagtacacactaggatcttttttatagcgttgtttttatagtattttaatttacagccatcatactaaaaagaatcgctttccaagttcttatttttaatgatattacataaagaattgagagattattatctaagagccttaactataactttagttgcctctgcaatgagttgattatcataggttgcctctttctcatctttactagataaaattacgatgataattggtgctctatttggaggccaaacgatagcaatatcatttcttgtcccgtaactaccagcacctgatttatctccaactacccagtcagttggtacgcctgcacgaataagtttgtcccctgtagcatttcctttcatccactctgtaagaattttacgtttttcagctggaagtgcatttccgaccgtaaaagctttaagattcatagcaatagctttcgctgtactagtgtcacgaatgtctcctggaatagcttcgtttaattctgtttcaaagcgatcagacatagtaatccgatcccccatatgcctaagcgctttttcatatcctttaggtccgcctattttattaaataaaatgttccctgcagtattatcacttgaacgaacagcagcctcagcaatttctcctagtttcattccagtatctacatgtttctctgtaacaggtgaataatccactaagtcttctttcgtaaatgtgattacttcatttaatgtatcaattgagttttgctgtagtaatactcctgctgctaaagccttgtaggttgatgcgaaggcaaatctttcgttagatcgataagagattgtttgatttgtaccagtatcaatcgcatatacacctactcgagcatcaaattttttctcaagttgtgagaactctttatgcgtcgcctgatttttatgtttcacttgtccagtcttttctttcgcttcaacttgcagtgcccctcctgtaaaagcttctaggcttgtaatacttaaacctaatataccaacgcatattcctatttttagcatcctcttatttttcaaaatcatcattccttccaaatttttagcacctttttatacgtacacataatagacaatcaccgaaccaaatttgttccacaaactaaaaaaattatagctagtatgagagttattaacaaaataagagatagtagctacgacgcctctatctcttatttcatatttcatttttttacttataaatggctttatatgaacagggtctcttccctgagaaaagtactctaattttgcttagaactacctgtactagtagcttcaccatgtatacgttgctgtttcaaatcaaagtatacatctaatacttcctttccaattatagaattaattccatttttatcatcatgaagccatggaactactacggaaaatgctacttctggattatcatatggagcatatccaactaacgttaagttgtaacattccatacgttctccttttgcatttctaccaatcgggtcatctccaccatatacagtttgggctgttcctgtctttcctgctggtttatatggcgcgtttttgaaatatttcacgccagttccatcaccttcttggaatacccatctaaacccttcttttatccgatcaatatgttctttcttcatatcaattcgatttaatacgacaggttctatggaacgtataactttgccaacctcttcttttattgattgttctcgtatttcttgtacaatttgaggttgcattctataaccaccattcgcaatcgttgaaatatattgcgctaattgcaacggcgtatacgtatcatactgaccgatagaaaaatctagtaaaaacccaggttgactatctacttttctcgtttgtccaattatttcattcggtaaatcaatacctgttgggacacctaaaccaaattgcttgaaataatagcgcatcgtatcaaatgctccttgtttaatatccaatgagccatttggtacgtaattgacccccgcaatttttaaagctgtctggaacatgtatacattcgaagatacttgtaaagcccgtaaatcattaatattaccaaatccggatacattccacgatttcttagcttgtgtacctttaaatttcatcggcgcgtcataaaattgatctcctggatgtattgcccctgtctcatatccagttaataaagtagcaccttttacagctgaccctagctcatacgaagttgtcatgtttcctaatgccaaatcctcaacctctattttcccttctttttctacaatctttttgcctgccattgataaaatttgtccgttatttggattcgtcatgacaacaaaagctcgatcgagcagtggctctgaactcttaaaagctctcaagtttttttctatactttcttccactttcttttgtaattccatatcaatcgttaatgttaaactattaccactttttcctttagagattatttctgtgctaacaatgtttcctgatttatcagtaatattttttacttcttcttttgtgccgtgtaatacatcttcatatcgttgttcaatataactttttccaacacgatcattacggttatatccacgtactaaataagaatctaaattttctttcggtaatccttcttcactactcgtaatatttcctaatacagaacgaaataaattatcgtttacataattacgttcccaatcaacagttgcatctactcctggaaaattcgcaagattttcgcttatccgcgcatactcttcatctgttacatcttttttaatgatttgtggtgttagttgataacctgaactcattttacttttaatagctaacacctttaaatcttgtgctgttaattctgctaattctacctctgtaacccgacctcgtcttaagtcttctatttttttatctaactcttttccctctatacccttttctttaaacttttctatatctttcttagtaatctttgtctccgcacgtttcgaattcaactgcatccaaaaatcttttttatcgatatctgttaatttatttatatcttgttcaggcatttcaagtactttcgccaagtcttttgctgtttttaaaatatcttcactcgtaattcccttcacccttgtatacgtaattgtgcgaagagatttattattaacaactgttttcccttctcgatctaaaatttgtccacgtggaactggaatactagttattgcattttgactactttccacttggttcttataagcctctccctcaacgatttgtacctttcctagctgcataataatagctgagaatagtacaaatatgcaaaggaacattatatttaatcgaatagatatatatgtcttctgcttcttgcctttttgttctttcataaatcctccatttaatcctttcagaaattgctacaaatactaaaagcatttcttatatattagataccgctaatcggttataaatatcgcctcaattttttgcttaatccttgtaagcatccattctttttcgtttagctacggcattaataactctcccttcttgttttctctctatttttttgccgcttgcattagaagtgctaaactgtataatgactcttattaaacttacatatagacttgctagtaaattttcatgctaattattcctttcttcatgctttaatacttaatagacaacctaaacaataaagttgttccacatttacaaaaaaaataattaaatataagatgaaataggctacataagggagggttatatgttacatacaaaaagatggagattttttgcggttctttctattgtaggtttgattttactaattttattaaaaatcaacttcatttcaattactatcgcaacttcttcagctgaaagaggaaagatttttgatcaaaatggtgtaatactagctacaaataagaaagttaagtctctatattgcacttctaatgatgaaaagctatcgaaacaagatacatcgaacacattagctttttttaatcaattttcaagcgagtttcaacatgatatttctacagagaacataaaatctcaattacaacaatcttgtaaaaagcagactatgaatgatataccgttatactctcatataactgagaatgaacttgcattcataaacaaaaacaaacccaataatgtaataattaaagatgaatggattcgatattatcctaaacacgaaattggttcacaagtaattgggtatgtagaaaatgaccttaattcaaagcatatggctgttggaaaaagcgggattgagctgcaatatgaaaatgatttaaaaggaaaaccaggtaaaactcttatttttaaattgaataataaaaagttcttatgggacattcaaaaagtacaaataggtaaagatgtacggctagctttagactctgagttgcagcaaaaagcagaagaagcattaagatctcaaattaagaaaatacctgatgctaaagctggttatgctgtagtaagcgatgcaaaaactggcgcaattttaactatggccaacacggcagtttttgatccaaatatattaaatacacgtgtatcttctagaaaagaaaacattaactctctttcgcaaaataaagcaattcaaaaattaaagtatggtgaatcttatgtaaatatggcttctactataaaaccactcactattttaattggattaaacgaaaagcttttccaacccgaagatacttatttagataaaggtacttttcagtatgataatcaaaataacattacgaatgcgcctggaacaccaacaggggagattacaccgaggcaggctatcattaattcatctaacacatttatgacagcaaaagtagctctgcccctattcaaccaaaataatgggaatatagaaaaagtggcacatatatggacagattatttaatgcaattcggcctacgttctaaaaccgggattgatttaccctttgaagaagacggacaatatgaattccatccatctaataagtttgaaaatggaatctccgctttattaaacgcctcttggggaggaaatgaagtgcatacccctcttcaactcgctcaatatgcagcaactttggcaagtaaaggtgataaatataaacctcaaactgtaagtgcaattattagtccggacggtaaggaaacaaaaaagtttaaaccaattttagaaagttcaaatcgttacccgatgaacttttggagtgtcgtgcaaggtggaatgagtcaaaatatagaggaaattaaaaagttgccctttgacgtcgcaggtaaaacaggtattacaggttttccgaatgagcaagaaagaatgataaatcattctcttttcattgcatatgctcctactgaagatccacaaattgccgtttctgtcgttattcctggtagtaattcagaaaaaaacattgccgctctcgttacatcagaaattttagagtactggaatactcttcaaaaagagaataaaaacaaagaggaaggttcattaaagtgaaccttcctcttttaccatatagaatctatatttattattttccatgttccttcattattcttttcgaacataaatgaatatttaatatcagttaaaacgtactctttctgtacatatccagtattaccgttaattgtcgaaatttttatatatccatcattttgcactttttctggaatccaagcttttaccatttcattagatatttcatataaaacttgtgattctctctttggttcagctaaaattttcgttttatttccagtaacagttgcatatataaaatgcgcttggtttggttggttactttctgtcaatccacttggtactttatatacttgctttgtatcttttgcaaactctcctcccattgtaagggcgacttgcaactcatgaaagatatcttcatcaaacttcagttcatccttcctataactctttcctttaaatagaacttcatcatttaacgctttgtacaagttattttcattttttgagttcgtactttgatatagttcattcataaattgttttaatgatggatcttgagcagactcatcttttgttttaggcttaatttgagtactactttgtaccggcgatttattatcatcaagccaaggttgttgaacaatgaaaaataacattgtacaaaccaaaacaactacaataggtaatgcttttttacgaaatggtcttttatgttttacaaaatccacttcattattttcatatatagactgctttattttagaaataaattcttcttcatctttacgattctccattggccctttttttatttttctataccagtcaggattttgtttattgttcatcactactaccctcccctattaattttgaaaccttacttctcgctctacttaatctcgattttacagttccaatggatactcctaatgtttcagccatttcttcataagataattcatattttgcgtccaatataattatttcacggtgctttttaggtagttctaatacaaccttccacacatcattcatttcttcttgcttaaaaaattcttgttctgctgacagggattgcttatcgtcactaaaaaatcctattaaagatatccttttaaaataagaggatttcaaatagtttattgccgtatttcttgtgatttttaatatccacgttttaatagatgactcctttcgaaatgaattccaatttttaaacacctttataaatacatcttgcgtgatatcatctgataagtgtggatctttcgtaataataaatgaataattccatacatcttgccaatagtcttttataacatagtccagctcatcatgattacacttttcaataaacgtctgttccatttccacacctcaaacttatttgaataaacataaaaactgccctcacttttattatggtttcaatatatagacaagatacaagtttcatttgttccattgtttatctttttcaagcagaataatactactaaaaaacaagtaaagcatacaatgataaaattctactcatgaaaatctgttttttgaatttaacgtaacactccacttgtccatttcaatttgctatctccttctatttgccattaacaatgtcaacttttctagaatcacagcaaaaaagcattctttctaatcgagaatgcttttttgaaatttaattgttctatattttccccaatttatatctttgagttaagcaaacctgtaataaatttagtcaaaaaattcaccatataattaagtattatttctgaaatacatgttttactttttcacctggaacgttacttcctcctcttccttttacatcttcaatcatcattgtaacaatcatgtctggcgcatttgcatcgaaagctgcgaaccatcccagttcttttccgtctgcttctttcgactctttcagttctgctgtaccagttttaccagcaagcgttacaccatcaacctttgcaattcttcctgcgccatcagggtcattaatgactttaattaatgcgctctttaatatctcttgattctttttagaaaccacattttctttccaattccctgctacttttgcttcttttaaaagatgtggcgacggaatattcccttcattcacaatcggtgcatatgttaatgctaaatgaagtggtgtcattagtacttgtccttgtccatagcccgtgtctgctagttgaatatcgttttttatcccatcttttgcaatgattgaaataggaagttcgtattcgattggtaatttttcatgaaatccgtactttttaaattcatttacatactgatcttttcccattttcaaagcttgttgagcaaaataaatattatcagagtacttcattgccttatcaaaatcaattggacttgcatcctttacacgcgttacatagtaatttccccaagacgaatcttttgtccacttcgatccttgaattttaaattcttccttcggatttattgtgtttgtttccaaaccaattgcacctgtgatcgttttaaatacggaacctggtacaaatgcttgtgtaaagcgattcgtcattggtagtttcgagtcgttactccatgcttctcgttgggctttcgatgctcctctaactattatatttggattataagcagggctacttacaagtgcgattgtttcacctgttttaggattgaccgctgcactagaccctgcttcagttttcatctcattaaagattttttcttgaattgcagcatcaattgttaacgtaacattttctccttcttttgcttctttttttgctacgtttttaatctctttccccttctcatcttctataaatacgcgtccacccttttcaccacgcaatttattttctaacactttctctaaaccggtcttacctactaaatcatctgcttgataaccttgtttttgaagtgattttaactcctccgcattcacctttcctatgtatccagttaagtgtgccgctgcttcacctaatggatacgtacgaatatttactgggtgagatgaaactccttctaattcaatataatcattctgtctggttccctcttttaaaataccaattggtacaaaggagtctggttttatccattttgctgtgagcttttgttcgacctcttctatagacatatcaagtaattgtgctactatttctttcgtttgcgctgctgtttcgcctagtttctctggaataattccaacctcagtcgctttaccattcgttgcaagcccttttccatttcgatcatatatttctccgcgttttccttgctctatttgcatacgtactttgtaatcttttttcattcctggaaaaatgaagtctggcgtccaatctattttccaagactctttatctttcacaagttttgcttcatggatgaatgaaactgatcctacatcggtatccatcttaacttcaaaaagaaaaagctctttatctttcgtattctctcctttcattttaacttttaaatccttagctccaatcccctcatagattttttgatatttttctgtgaattcttttttagaaattgatttttttgcatgatctgataaatgatcatacatatttgtaaattttctatcattccataaattgatatattcttcaaatgcttgttttggcggttcgtttttattacatcctaccaacataaccgcgaaacaaacgaaaagcagcatccataattttttcaattcaatcttctcccttagttaaaaatgatgattcctttcttaatttatttaataaaaaatgttttaacgcttaatagacagtgaaagtaaggatattgttccatatttaccaaaaactaaaaaagagtgataagaattccgtaaatttggaatcctcatcactctcgtttgatattgtgcaaatcatgaatatgaaataataatttctaattttaaaaaataattttaattttccaactaacgagataaaaatcatgtatttgttctatttttaataattcataaattcgttgaaatgttcgcatcaaattcatctgatgttttggtatctatttttctcccatcaattgtcatctttattttttgtttttggtttgctgttaccacccaagcgttcggtaaataacgatcttcatgggataatgtagacggtgaatttataacctttcctcctaaatatagcgtagcagaagaacctccatccattgccattgcatttatagctcctttttcatatagaatatcttgacactctttcaacgtagctcctatactatgtgtctgtctaccgtcaataactagaaacataattgtaccatcttctttttgggccataatacttcttggagccgacccccaaccgccgtctccttctgtaatcattttttctccatttacaattaactgtggcataaatccagctgcggaaacgacttgtttatccaacagttgttgggtagaataatttcctgttatcatttgaccaaactttgttaatcccgtaataattgtaggggcatttctatccatatttgtatcaatagctttcccattttctatcacaattccagtagcaacatttcctccaccccttcctgtttcgtcagcaaatccacttgcattcacagcaacaagtgcatgattacgttttgccattacactaattttttctcccctgttagcaccctgtgttccttgatggctaacaagtttaacattgaaaggattactaattgttactaactttccttcgaaaagaaagcgactatctttattacttttaattgtttctacatcaatttctaatggctgattttttaattcttctaatctttttcctactatttttttataaatatgctcatcactgtttgaccattttggatgattaattctatcttgcagtttatctagttccttttgggataggaatgtatatttcgcatattgtggatgctgagaagttaatatactcccagcgattgttatacgaagctctcggccatagctagtaccaaatagtattcctacgccaataatcattaaaatagaaaatagaagcaaaattcgtttgaagatttttcttagatgtttcatagttttatcctccagcattcattacattcaataaatccattaaaatattatttatctaaagacaaaagtgtttgatttcctcatgcctgaattccccactatgttttagcaattaaggcaacatacttattccggatttcgtttttttagtgtatatttataaatttaataacgtttttgcaaccatgaagtaaattattaatcctgttccgtcaacaaatgttgtaataaatggacctgaaacaactgcaggatctagttttaattttcttagaattaaaggtaaaacagctgctacaagagaagcccaaataacaataaataataaagtaattgctacaacttgcgcaacttctgctccaactcctaacatataagcacgaatgagcccagctatcccaagtgcaagtccaagaagcataccaattgcaaattcttttttcattacacggaaaatgtctttaaattttaactctccaataccaattgcacgagtaattgttgctacaacctgtgttcctgtattccctccagtacctactaataatggaacaaagaaagcaagggcaactacagtttcaatttcgtcttcaaaatactttaatactgtacctgtatatgcctcagcaacaaaaagaagtaataaccatggtagacgttttaggaaaatgctccaaatactagcttcaaagtaagattgattcaatggttcacttccgcctaacttttgaatatcttctgtagcttctgcttccataacattcattacgtcatcaaatgttataataccaatcattttattatttgctgttgtgacaggtattgctgctaaattataattcagtagcttttttacaacttcttgctggtcaacttcagcgtgtactgaaattacctctggcatcatgatagtagataatatctcttcatctgctgctagtaataactcatgtatggaaacgattccctcaagataaccatgactattaagaacataactataagatattgattctacattttcagaatgttccctaatgtacttcaatgtcatttttactgaccaatttcctctaactgcaacaaaatcacttgtaacaagacttcctgccgtttcaggtttgaaagtcattaatttttttacgttatgttttgtaattttatctagatacgccattaatttagcctgttcttccggatgaaccgctagaagtaaatctactaattcatcaatcggttgtaaattcagtaactttttagctttattttcagataagtgaattaagatattatatttttcttctgcactcatatattgaagaactttagagctttttaatacaggaatcgtatttagtaatatgacttgatcttcaattgaaaactgttttacttcttgcgcaatatcatacgacggaagacgtaaaactttctctgcatccaagttattttgggttataagtaattcctttaataatttcttcatgttaactcctcctcatattgctaagggagactctagagtttcatgagtggttttgttttattttatctgtcttaaattttttattagagcaataatagttacattgcaatcaattcattagttagaattacctcctttttgaatatagacaagataaaaataaataacattaaacagaaaaacctttactcaaaaaggagtaaaggttttttcacaatacaaacaaatgattattaagacagctctgccgaaatcacagaggtgcctttctatcaaatcgtataccactccctcgttgagttttagcactgtatagcataggtttttataaccagctacattaagaagggccttaatccgaccgttcctgttgacccattggcgtctctcgacatttttgggcagcagcgtttctctatacaggagcctcacctaacaaagtttattgaattacttcaaaatttaaaccagaatttaatatttgtcaactgactttcaattccatttataaaaaaatcttttatagaaaatgaaattatattttattataaatttaaaattccccttaaaaaacatagaattcaaatagatttaattcgaagaaacgtaataaaacatatgaaacttattatttttaatcaaattccaactttataacaaaagatgaataattagtcattctgtatacaaaaagaacattcacaaaaaatcttcttttatgattaaaatcttctttactgtttatcaaatttatatggttaaactacttaatcaaacgatacactacaagtcaaaaatatgtacttatacagaatgattacagacatttttttatatcatttctcaaaggactataaagcaataaaacaaataaaattagcaatatggttgcttgacaagcaaaaaaaatatatttatgcttgctacacgaaacaaacacataaaatttatattgcttaacctgttaggtgaggctcctatgcaaacacaggctattgcccaaaaatgtcgaaagacgccaatgggtagaacaggaattgtcggattaaggctcttcttaagatagctaagtaatgaattttcattactttacgttgtatagtgccaaagctctactaggggggaaaagccttatttagtcatgccattttgaatccctctagttacatactagggggatttttgcgtaaaaaacagggaataagtgatagaatctttctaaacaaaagtcatatttagtaattgacgagaacaagattctattcattaacaaatgtaatattatgttttgttttaaatcaggaggatattaaaatgaaaaaaatattaaaactcgattatctattgctccttcctctattcataacatgtactttaggcattatcatgatgtatagtgcaagctccattgtcgctgtccaacattacggttataacagtagacattttgttgattctcaattaacaaagctacttttaggaacaataggattaataatttgtgctttactcccatatgaaatatggaaaaaacgaatagtctcaatctgtattatgattggggggatttttttattaattatggttttatggaaaggaaaagtggtaaataatgctcaatcatggatctttggaatacagccagctgaatttcttaaattaggaacaatacttgtaacagcccgtttttttgcattgcgacaagaacaagctaaaaataactggagtggtatcggaaaacttttattttttttagctacaattttttttcttatctttaaacaaccaaatttaggatctgcacttttaatattaggtataggttttagcatatttctttgttcaggaataaatataaatctactaatcaaaagaactaccatcggttctattttatggttacctattttatattatttgattcaatatagtttatcagcagttcaaaagacacgtattactacgattttcaatccctttcttgatgcgcaaggaaatggatatcagcttgtaaactcttttattgccattggctctggaggaatcactggtcgtggatttggaaatagcatacaaaaaacagggtatcttccggaaccacatactgattttataatggcaatagtttctgaagaactaggatttattggtgtatttattctattggtgggagttttgactatggtacttcgctccttaaaaattgcacaattatgtgtagatccattcggcagttttatagcaattggtataggatgtatgattggtatgcaatcagttgtaaatttaggtggtattacgggactatttcctcttacaggtactccatttccatttgtaagttttggtggaagttctttaatggtcaatttaatagcaataggaatattgcttaatatctcaattttcaataaaataagacattctcctttttaaaatctattgtactatagtcatttttgttacatttagagagattatacaggctttcataatgatttgatcaaactgtagatttcttaattttagacgaacatttaaaatattttatagcatagaatagacagtatacagtagacaccactaatatctactaggtgaataaaaaagaaggagaaaataaatgactctaaatataaatagagtattcccacgtaattggtatgctgtgagttatgcaaaagatataaaaaagattccagtaaaaaaaagagttgctggcaaagattttgtattatatcgggatgaaaaagacgaagttcaggccctatcaccttactgccctcatcgtggcgctgacttatcactgggacaagtagtaaatggtaaactagtctgtccctaccatggttgggagttcgatagttgtggtacttgtgtaagaattccatcccaacccaataaacctatcccgaaatttgctcataccctctcataccctgtaaaagaaaagattgggttgatttggatatatcctgataatgaggaaactccacctgaatggcaaacttttcatgtaatggagaacactccttttaaactctctttcttccacgccacttggaatgcacaccttactcgatcaatcgaatctgtgctggatattgctcatcttgcttatgtacataaaaaaacgattggtagaaaaacaaaagccgaatcaaccaattataagctggagggaacactggatcagtttatattctcaaatggtgatgcttaccttgaatacaaattcccacatcagtggatgcttcacagtggcaaacaggagaatgagtcatttattcagtacattacgtttacaccaattgatgaagaagagacattaattatgggatataccggaaggacatttttaaagtacttccctttactagaccaaattttagctaaatttagtttaagagtactaaaagaggatcaaattattgtagaaagtcaacatcctagacctataccagaagctttaaaaatggaggcccatgttcatgcagatatggctcaagttcagtttagaaaacgttggtttcagtttttacaaaatgggtcttgtttttcacttgattcaaggcacgtaacgcagtattaaatataggtgtagtgatgttgatagacgtggatgctaccccatcgccatcaagctaaaattttatagtaccccctgaacccaattttgtactaactcgtaacaaaaaatcccttcaaaaaaagaaaggcgcctatgcacctttcttttgtaattcattctcactctcttagcattcagaatcccttatgaatcactttaatgcgtcattgtacggacctaattactctttaaaaaagtaataatttgtctccttacttttcagtaacatatttcctcttattattaaaaataagtcgtttctgcttaatatttttactataactctaactagtgctaaccaaaggatcataataagccaaatataatttattaatcacgtttaaagtacataagtctgcactgattgaaaatgcagaaccagcattaatatcgtttagcgtatttctaatccgctaacgacttaaatcaccttatttcactctcttcggtaaagctgagcctgaatgttcaattactagatgaacataaacattaatgtcagcattactaaaataattttcaccttgatcccaattcttacttattttcttccattctttataattattccgcttatatacttctcctaatgctaatacatccaccttatatttttttgaacaagctgtattgatttttgaatcctttgctccatctcttttgaaatatccttcgttaagcgttttttatctccatgctcaaatgttttcaattatttttgtttctccagatttattatagaatctttcatctaaaattagtctgttttaccagttaacatagaatttgacagacgaataaattcttctttgcgatctaaaaaaatgtatgtgcaataagagttatgtttaacattaacaaaacacttaatataaccaataaaccatacacccaaaatttacttcttcattgaaaaaacaacatttttagctagatatagtaagttattttaggatgaaaaatttaaaatatctatctttatatacagttcaatatattactacaattttaacaaaggaccacaagcaattgtaaaagagaaaatgaaaaaacaaattaagttttaccctatacaatcattaaaatatattaaatttattgtttaattaccaataagaatttcataaagaaagcacagacttattaaggcacatatttatctaacctacataaaataaagatgtacaattgcctactttatgaattttttataatgatatatagaaaggattcattaagttatgtttgttgggaaatagcatttatatttcttctaaaataaacagggtacaaattgcacatatcggcctgtttattttagagaaaagttgtttataagtagttcttttctttaaaagaaggaactacattttttaaattaaatttctaaatgaataaatttagcacgagaaaggaattgaacttatgtctaatttaaatttcatttctgatcaatttgctgcaattcttaaaggaaagagtaaaataaatcaaggtggttgttcggtgtcttttcaccgcaattttaaggtcctggttcaaggaaaaccaagtgcctatgtagttcccgtcggagtaagttttgaatcgttggatcaaaatggcaatgcattaaatttaggagaaatcgcggttctacaagaagagatccctgcatttatgaaatcaattgtacaacaaggaattattgtcagtgctttacataatcactggttatacatgaatcccttaattatgtatattcatatccaatcggtagagcacccgttacattttgcaagaaaattggcaaattcatttttatcgttaagcagctatccggttactaataacgaagggcaataatttatctacaatcatagatatagtaataatatgtaccagactccatgcacgttgcgcttgtataaatagtattatctaatgtatcttcttccgttattactcctccttttggaacctcacaattttacaaaatacgaaaaatgaccgatataccctcttcttcgttatctataccctgaatattttatttaccatacgctgcccgtataaaccttgatagtagggtgaaatctccattaagtcccattgaacctgaaccttgtccaaaagcacttaatggtatatccccctcgcatggctgcgatttaagacctatatattgtcttacattttgtaaatgccaattaaactcaggactattagtcactactccttgtcgattctaatacaatagattcaccccatttatccgctaaaatccaatgtaatggtggagtaactcctaaagcaggtaatggtacccccaaaaaggaaatactagctacaaatttctttaactcttcaacagatttgaattgtgtctttcgaaaccagaagaaaagccaatagatttctgaaaactgggcgtatgatttgatattgtaaagccctcaggcatcaatttgttcatcacctatcatcatgtatcccttggttgaaaccatcagcttttctgtacctcttcccagtcgatagctcgaaaagttatgggtgttgagctcaacttaacgacgacgagagctgctccccaattagtgatgaaacccattatcacatttcgtatcatgtggcataggtccatccaaggaatccagaaaggcaacggcctgtttgaggttcctcaaaaataaatgcgcgagatccatagaaaacccgtttcgaaccacaacgcgcataattgtcactgcttctaggtctggaggcaatggatatgcgggtacttgccagccgaacacacgcaattgtcgagataaatcataaaggttccagtttaatgtgtaaccttttttcagttgccaagcgaaaaccggaatatccgaaccatcggacaaaagttcgaatggttccatctcctgaattgccttgctaagaaaaagagcgaccttttgagaagccctttggacatcatagtacccacttttccccaaacgcaggtaattgtaatattgtagaagcacttgtgcgccaggacgtgaaaaattcaaggcaaaagtcggcatgttcccgcctaaataggagacgcggaagattaaatcatcagggagatcatcagcttcccgccaaattatccaacccaagccagggtagactaatccatatttatgtccggatacattgatggacttcaccctcggcaactgaaaatcccagactaaatctggttgaagaaacggtgctataaatccgcccgaagccgcatctacatgcataggaatgtccagtcccgttctctcctgtaaatcgtccaacgcttttgcaatggcggcaaccggttcgtaaagtccggtataagtctcaccgagaatcggtaccacaccaatcgtattttcatccacggctgcaaggaccccttgaggatttaatcggggatgctcagggctaaccttcacatagcgtggttcaacctcccaatagttcgcaaatttttcccaaacgacttgaacagcagaactaaacacaatattaggccgatccaccggcttaccctctctttttcgtgcattttgccagcgtctctttaacgcaagccccccgagcatacaggcttccgacgatccagttgttgaaacgcccatagttgtaagggggctgggggaatgccagaggttggctaaaatgcggacacaccgctcctcaatttcagctgtctgtggatattcgtccttatcaatcatgttcttatcaaatgatttagcatataagtgctctgcggtaggttccatccatgtactaacgaatgttgcaagattcaaacgtgcattgccatcaagagtcatttcatcatggacgatttgatacgctgtttctggtaacatgccttcatcaggcatgtgaaagcgcggaacgactgattctcctttgcgggcaaaaagaggatttatagaaaattcgggaggcagctccatttgcacgtgacgcggtagatattgtggattatctggcataacctcttttccttcatatgtatcgttttgcacttcttcttttcgatcctgcggcatactagtcccccttaattaatggtttaacaaatatattatttacaaaaaaacatttgctaaaccaagggacaattctaataaaaggtgatgccatcattcaaaataaaggagtatagtttttgattataaaatagaaattgatttatattttaatgaaaatattgaatgtttttaatataattattgagttatgtatttatagaaacttaagaggtatgattatggagtttattacttttaaagtaatttgtatctttttatttttaatgcttatgacttctatagaagttttaggatatggagttcaacttgttggggcgaaattagctttagttgcatcggcttttgctaaatataatattatgtctttaattgctcgattttctaatatgtttcaacaaccatttactgtttctttagttgatagtacagcaaaaaatggtagattagaattactaattaaacaattagatttttgttattagattctactatgggagtaatacttggagggattattagtaccattttttatgaaagttctttctaaagcgctaataccattgtcaaaagatgattcgtttttaaacatgttcaaattaatatgttcacaaaagaattgatgcaacgttaaaaagaatgagcccggtacaataccggacttatattcatacaaccgctgtatttttctgtttaactgttgggattcagttcataatgaaacatatttttacataaaagactttcgtatataaatttttcaaatgatttattagcgaattgttgaccaatatcacttttttgagtgagtaattttttagattgatgatataatgaattttgttcgtttcttttatgtaaaatattctagttttgcattaggaaagaactgtttcatataggaatacagatagttttttatatcctcttcttcttctttttgataaatgtattttccgattccatatttcccccatttataccttcttttctcttcatctaattctagttttgtcatcgggtagtttttttcaattactctcttagctggctttgtaaaacgatgttgaataaattcaaatgtaatatcatcccgtgcatcaagaggtaattcagcatttaggcgttcaaacatatgatagtatccttccttccagccttcatgcaggtaaataggagctacaatgaaaccaagaggatatccagctctagctacttttcctgctgcctcaattcgtttagctaagggagaagttcctggttcaaagtttttaatcacataatcagcgtttacactaaagcgaaatcttgtttttccgttatgtttagcatcaagtaaatgatctacatggtggaatttcgtaacaaatctcaatttcccatattcagattctccaaaatgctcaatggcccgtttaagggtatgcgttaaataatcgattcctacaatatctgaagtacacgacgcttcaaatcttgttacttcaggtgcacgctctttcatgtatttatcagcagcatctaaaatttcttcaacatttacatacgttcgtatataaggcttacttcccatcgttgtttgtaaataacaataatgacaatgtcccatacatcccgtcgcaaaaggaattgcatactctgctgaaggcttggaagtatcgaatttcagtgtttttctaacaccaacaaccagcgtggattttgctactcgatacctttgaaaatcgttatcccctggcaaatctcttacttgattatgggaagtagtatgtcgaatttcaacatccatctttgaaaacttctcaaacagctctttccccaaaggataatccaatgctttcggttcaaaatatacgagcttaggcataaatggcttattcattctaacatcccctctgaaatatcaccataatagtaagtgtaagcttggtttgcctcatcttcggtagcatatatagccatctcatttgttagtggataatacgtttcgtaaagaaatagtgctaattcattaggtctttcaggattatttacaactgctgcagcttgtatgttagctacgtcttgagtatgaggatttcggtaaaaaatataaacaatgtcaccagcatgatacgtattactttcagaagaaaattccattccatcaccatctcatttcataaaattcaatgctcacagttttactttctaatttccttgtagtgtaactatttaattacattgataatgattacgtcatacaaacatattttgaaaaatgaataataaatgtactcccaaaaaggcaagcatatatcaatgcttgcctttcgttctaacgacgatgttcaacaagatcgattacacctaaaacgacgtgtgctaaaccaaaaccaaatactgtatttgcaatcattttattagttccacgagtttgtttaagagcataacctgctgctgtcactgctgtacctaaagctgttggaattaatccttcacgaatgtccacagtgatgcctccttgtttcgtagttagtaaatttgttttaatgactcgaagtaaagtattaaaacaagtattagtatttttctttttaataaaattatgtgaaatttttatgaataatattttaaatccataacagctataaagattgaaaaaattattaattaacaaataagaaaatatcttcaaaacgtattttcttatgaaaattttatacctcagacaaaaaaatctttgcgaaaattctctccataaaaagtgctcctaaatttatatatataggagcactttttatgaaacactattctttatttgcttatgaaccactttattataataaccatgctttacaacttgcctaaaatcatctacctcgatatccattctttccgcaatatctacaacaattgtattttgtaaaacattcaccacaaatcccattaatttcaaattatgatttttacgatatgaaaattgaacgtaatccccaagtgttacttctttattatgtttcatttggcgccccctaaattatcgataattatacaatagtttcccccttttttacttctacatacggggtcaccagtttatcattttagccaattcatctcccacctacttattttacgttccttgaggaaggggcatgcccatcaacttaaggatagaaactctacggttttccattaattgaaatgaacaaacttttaaacagtataatcaattttccttttattatacaagaaataccctatagaatagacttttttcaagtgtctattctatagggtacattttaattggcttgggtgtctttttttataaaaattatttaccatacaaatagcccaacgagcatagcacttaataaagaaacagccatcccgctaacaagaagcttccaaacatttttaccgatgactgatgatttttctccgccaaataatgaattgtaagttccgtaaatcatacctactgtactaaagttagcaaaagaagctagaaatgtcgttgcaaccgcaaccgtatgcggttgtaacgactttaagtttgattttaaatccatcattgcaacaaattcattcgtcgttattttgatccccattaattcagctacatacatagcatcactgcctgataaaccgagtaaaaatgcaaaaggactaaagataatggagaagattttttgaattgttaaccccgttacaaaaaatcctaaaatcccatttaaacatgctgttaaagctacataaccaattaccatagctaaaataacgataaccatattcatcccaactaacatactgtttgaaatagtagaaaagaaatcctttttttcatgttttgaaggtgtgtaaacaacgtcttcttctttcgaaacttccacaggatttaatacattggctaaaattaatgcgttaatacaatttaatggaatggcactgaaaatatatgttgctggcaccattgataaataagcgccaagaatggatccgctaacgctactcatactcataattccaaaagttaataatcgattttcttttaacacagataattgatcacgaacaaccgcaagtgcttcggtgtttcctaaaaacatcatttgaatcgaaaagaaactttctaactttggtaaacgagaaatctttgaaataactgcacctactttatcaataatccaagttaagattccgaaataagatagaatatcgaaaaaagtaataacaaaaatgataggaagtaacgcactaaagaagaaatcaatgtgctgactttccatagctgaaggaaatgcaaatcgaataccttcattcgcacatgctagtagccaactgaaaaatgacgcaattttattaatgataatactgccgagctttgtgcctaacataaaccatgtaataaaaagctccaataggatgagaattacaattggtctccattttatatgttttttattaggcgaacataagaaaacgattaatatgacaacgaaaatccctaacatattcaatatgaaatgcatgtcaacaactccttgaggcttattatttgtatataaaaaagcatctattcttccaaatttggattatgattagaagttatgaagcatgtaagttatgttaggaatcaatgtattttaatttgctttattttgagtaatcgcagtaattatcgaacaattagttgttttcaattgttttgttggatattaaacgtatgcgattttaaacatcgtttatcccggattaacgggcagtaagacttttacctcaaaattcagggaaagcaaagaagtggggatgggctgcccgcaaaatcccgattggtaagagctgattaaaatttcactttataaataagaacggtgagttggccatgaaccttgaagtttccgaagctgtataatttgtcctgtatgataagcatcatgcaaaaggatattcatatattgttgccaaactggtagagaaggacttagttgatctagttctgcttcttgaagggcggttaatgaagattgtaaggcatcatgtacttgaagcgttcgcttttctcttcaataaaccttctctatagttgaacaagagagtgaaatacaacgtataattgagccattaaaaaatctcatttttaatatgatatttaataatcaaggctttcattgagtcagaatgaaaagagtataaacctttttctgtttgctcattgattaaagttttttttaagttgcaaaacggttctaaaaatatagaaggtaaaattcgataaaaatagaatatgttatatagcaaacaaggaggggataaaaatggaggtctatcatataacgagcagaaaaagggaaacatacaacgttcaggtgaaatattcgatacttttcgagtgtgcacttggcattgcagcgattactcataaaaggttaattgatactcttgaaaagactcaaagtgaatgggaagaaattaagaaatcattaacagaagaaatgagagaacacttacagtttgtagaagaacataatacgtggaaagcgttactccagttattgtatgaagaggattttcaagatttatcgcagtttaattttaaaattgattcactttcagaagaagatttgaaatttatatgtttaccgtttttaggagagaagtatgaagagaaaagacgtttagctgcaacgggagttgtatgtgcaatacacgaactaaaggaactaacagataatcatcagtttttttctacttatattagctttatatgtaatgtagatgtacaagtgctgaaatcgcatttaatcgctgttatgacaggttggtatgagagtgttattaaaagagaggaagaacaaatactttctatattaaaacgagattatgaagcaaaaaatgaaatgaataaaaagatgaaaccagaagagtttgttgagtgggctactggtggcattaactatatgccagaaccaagtgttcattacgtgcttcttatcccgcaaatgacgtacagaccgtggaatattgaagcggatattgaagatacgaaagtatttcattatccagttgcgaatgaaagcattcatcctgaagatccgtatgaaccgaattattttttagttcaaaaacataaggctcttggggatgaggcgagattgcgaattgtaaaaatgttgtttgaaaaagaacgtacattacaggaaataacggaaagattacagcttggtaaatcgacagtacaccatcatttgaaattgttacgtgcagcgaagttagttgatatacatgacggaaagtatgtattaagaaagaaagcagtacagtctttagcgaaagaattagatatgtttttgaatagataattaacaacgagaatgtacataaagggaggaatataaaagaaaagttggtgtgtgaaattgaaaaatatattgaaaaatcgttcgtacttttttatgtggattggtagtgcaatctctgaattaggaggggctttcggaacgttatgtaattcaattctagtatatgagttaacaggatcggaaatggctttaagtagtatgtggctattatatttcatcccatcactcatactgcaattaataagtggcccatttattgataaatggagccggaagtggattatgattttttcacaatggatacgggcgtccgtattcttattacctttggtgatgctagttacaggtagtatagaagtttggcacatttatgttgttcaaattgtagtgggacttattacacctctttatacacctgcgagtcaggcaattacaccgagcattgtaagtcaaggacaacttcaagacgcaaatgcgtatattgatggaatgactcgtctcatgatgtttcttgcgccagtattgggcggagtagtcattcatttcattggaacagaacttacattatctttcgtatgtatttgtctatttgttagtggtgctttcttactttatataaaagaaaagaggactacaacagatatacgaaaaacgtggctagaacaatttcttcaaggttttacatatttttttacaaaaccaatcatcgtttggctcggtatatttcttactttcgtgcagtttggagtaggggtaacgatggtcacaaatcttccttatataaaagacgagctgttagcgggatatgcagagtacggctattttatggcaggttttccacttggctacgtaattggctcagtattagtgggaaaagtaacatataaaagccggcgtatacttatgcttggaggattgtttataggggggctcacatacatttcattagggttcaatcatagtattatcattgcaataataattgaagtaatagcagggatttgtattgcatttttcaatgttcataacacaacaatatgccaacaaatcgtcccaaataatatgataggacaagtattttcagtgcgtttattttttatacgatccgctatgccattaggtgtgttagtagggggaatattgagtgaaatgtggggagtaagagcgctatatgtaattatcggtgcaattatatgtgttacatctttaatagggatgttatttccatatttcaaatttttagatgaggcgatagaaaagaaatcagcataattcaaaaaattaaaactttacaattgaaaataattatcataatcaattataatagaagaatactagtattcgtattacaaagagggagtgggatatatgtttatcgaaacgaaaacatttacagtaaaagaaggcacatcaaatatagttgtagaacgtttcactggagaaggtattattgaaaaatttgaaggctttatcgacttgagtgttcttgtgaaaaaagtaagacgaggagacgaagaagttgtcgttatgattcgctgggaatcggaagaagcatggaaaaactgggaaacaagtgaagaacacttagctggacatagagcgggccgtggtaaaccgaagccagatcatattattaatgtggatcatgcggtttattatgtgaaatcatcgaaatcggcttatcaacagtcgtaatatataagtagaggatacatgttgtagatgctaacatgtatcctctttttgtagtaatgggggatggaaatgatggagagtttttcattcattacaaatgaaaaacataaaaaattggtacaaacaattttaaatgaatatttatttagagataaagtaaatggattcatgctaattggatctgtcgcaagaggtgacgcatatcctgattcggatttagatttctatattcttttagaagaagggcaaaagaaaaaatttcattttgaaacgagtgatgatattttagttgaatataagagtgcagattttaatcaaattcaagtaaactttaaaaacaatccgatggaattttactcatttctagaaggggaaattttgtttgataaaagcggtgagttgaaaaagttaaaggaaatagctacatatgaatttgaaaactatcgtgtttctagcgacaaaatgaagggcatttctcattggttgcatagttcattaattaaaattcaatctgccttgaaagcaaatgatgagttaaaagcttcatacatagttcaaatttcaacttggacattgttagatgggatatgggctgttaataataagcctataccaccagcgggatctgttttgaagtatattgaaacattatctaaagtaccaactcattttaaaggttttatcaataaactgtttttaggtgatacgacagaacgtacctctgcagcaattttcttgattgagtgggttttacacaatttgaaaaataaataatgtggctattttatataggtaaaataatatttcgcgtcgaacagtttatggaattacagtcataaaaaacgttctaggctatagaaaaaaatattagacttataaagcatagtcttagatggaacgcttgaatatcttgccttacatatttaagtgttatgaaaatgaatccatataccctctgtttaaaaggagatgagtacatgaagctgaatcatttaaatttatgtgttgatgatttatcggaagcgagacatttctttgaaacattttttgattttcaatttttggagcaaaaagggaaagcacttgtagtgatgagtgatgagagtggttttatacttgtactaagtgatccaaaagcatttaaagggaataaggaagttacgtatccggaagcttttcatattggttttttagtggatacatcaagtgaagtggatcaagcgtataatcgtttagtagccggcggcattgaaatagacaaggaaccttatttgatgcgaggtagtagttatggtttttattttacagtatttaatggcttattaattgaagtgtcttgtcttgattatagagaaggtaagaaagtttcaaagcttaatagtaatcatctagagtaatcatttgaaggtgtatagaatttaagtatgtatcatattagaagacggattaagaaagtttcactgtaaagtaaaaaagacagactaataaatagtctgtcttttcacattaattcttcacatcatcataaagttcaagtgcctctttcacattcaatccattttttacaatgccatgtattgcttgaatcatcgcagctgggtgctcggattgccatatgtttcggcccatgtctactccaattgcgccttcttgcaacgcattgtacgtaatgtttaatgcgtcttcaattgaatctaattttggtccaccagcaatgacaactggggcagggcatgtgctcgttattttttcgaatccttcacagtaatacgttttaataatatcagcacccatttcagcacatacgcgggaagcaagtgctagaaagcgagcttcacgtttttgtaattcttttgcgactgcggtaatgccgagtactggcaggccgtaatcatgagcttcagaaactacatttgcgagatttgtaacagtttgtgtttcatagtctgatccaatgaaaacagaaacgccgacgccaattgcgttttgttttactgcttctttcacaggtgtaacaattgtttcattcgctaaatctttaccgacgacagtagcgccgccagatacacgcataaccatcggtgtgctgcagttttcaggaatacaggagctaagtacaccacgcgttaaaaagagagaatccgtgtaaggaagtaagtttttaacagtttcaagtggctgttcaagcccgtgaattggtcctaaaaagtagccgtgatctatcgctaacattaccgctctgccatcaggtaaaattgtatttaatcgatttttaaatccccaagtcattccaaatcactccttcgttaatgttggattttccgtttgtaccgtatctttatttggtaaatgtggtgactttataaaaacagctttaaaaggtttgtcagaatggttaatcagatagtgagattcatgagggcgaacttgcaggacatcaccttgtttaattggaactctttcgttatttacatagaagtctatttcaccttctaatgcataaaagacctcttcgcacgtcgtatgataatggttttgaaactcctggcccggttgaatgacaacaaggccaagatcaatatttggaccttgtattaaatatttcggcccgttatcaccgaagcgataggagaagtcattttcattcgcttttaacatacagttcactcctttatgtaatgtgttacagtgcaccaggcgcaatccacatatgtgaggtgagccctttatcagctaaagcgagctgactgtcatatacagttttccatgtttcatagaactctttatatagttcgtgattttcagtaactggttcgaatgtttgctcccactgtacaaactcttcggcagtttcttccatagatgaatatatgccagcaccaactccagcagcaatcgcagttcctaaagcagctgcttctttcacaacaggtacttttacaggaataccgagtacgtctgatagaatttgtggccatagttttcctttagcggcaccgccagcaaaaacgacttcagaagggaatgtaccagtaagattttcaattagttttaagtttccaagtgtaacgaaggcggcattttcttcaatagcacggaacatttccttttttccgcatttgtcagcgtctaaacttaaatttaagaatgaaggtgcggcatgacgccaagaaatgtagttcataacgtttgaaaaagtagggataatgccatgtgaaccgacaggtacgtctttcgcttgttcttctagtaattcataagcatctacaccgagtttatcagcaagtttcttttcttcttggcaaaaagcgtctcgaaaccagcgcataacgagacctgggaaaaaggcgattgtttcatattgccataggttcggaacgacgtgacaatttactcgaatcgcagcatgtggatctgttattggctcagtaacattcacttcttgttgccaaaagctacccccgcatattaacgtttgattcggtttcacgattcctgttccgagcgatgccatttgagcatctccacccccggcgacgacaggaatcccttcaagtaaaccagttaatgctgcacactcttttgtaacgttgccaattactgtaccagcttcatttactgttggtgaaaatggcaaagatagaccgcactccttagcgacatcgttatcccacactctattttgtaagtcaaaaatacctgacgtgcatccgtttgagggatcaatttgtagtacgccgcttagtttatataaaatccaatcgtttaacattgtaaaagagtaaatattattatagacgtcgggttcatgtttttttatccagagtaggcgtggtaaagcacctaatgaaaaagtttgaccagactttgtatataaatctttttcaagatgtgaccgaatttcttttaattcactaacttcgacggatgcgcgcccatcaacatttgcacacgcccatatttcttgcccatcttgatcatataaaacaaatccttctcgcatacttgtagcgctaatagcaagaatagaagaggcaggagtgttgcttttttgaagcacctctttcgtacattcttgtactagcttccaattttctactacatcaaagttcatagagcctggataacgaaggtcagatttgtgaatccattctttttgacttactgcaatttgattaccatgtaaatcaaaaagaactgctcgaatgctccctgtaccagcatcgaaagctaataaatgggacattaacaatcaccatcctttcgtaataaggagagggcagtttcctcatcggtaattaatgtatgaataaactttccttttaaggcaccataaattgcatctatcttttctatacctccagcaacaccgacgacatgattcatattgcgcaaaatagagagaggcgtgccaattagacgattatgatgcgagagctctaataactcaccattcgtattataaaactgtcctaaaatatcgcccgccccgttttgacttcgaatatatgtcatttcacgtagcgttaatttttcttcttttacaattgtagcgtcttgagataacccgccaataccgacaactgctgtatgtgcaagtgaagcgacatgaagcatatctttcacacttggttctgataaaatacttcgtgccatttcagtagaagatgctagaaaaggagtaggaataatatgaagatcaccttgcatgtagtgtaaatagttttgttttcttgggagatagtggtttactccgcctgttagcgttacgaatgaaagattaatagaactttcaaaatgaatgttttctagcattttacttatcgtttcaccccagccgatgccgagtaaatcaccttgttggagatgagtttctaaatattgtgcagcggcttttccgagagaagtagcataattgtttattggagtagggataatgaaagcatcttttaagtggaactttttcattaagtcacgttcaatgctcaagcaatgcaaaccggttccttttacgtgaaatgtaacgataccttcactgcgtgccttatctaataaccggacgactttatttcttgaaatatgaagaagtgaagcaatctcttgttgtgttaattgatctttataatagtaccaggctactttaattaataaattttcttcaaagttcagctgtgacatactcttcatccctttcaacaattgaccaatgcttaaacatatgtgtcacatattttgtttattccagttgaaacgattaatagtacattgaaaaaagtgttctagatatgaaaaaaggaatatacaatgctacaaaacaagtagaacaaataatcattttctcaaaaaatgttctgggtaaaggcaggtgacatcatgtggagaatgtgcccttattacaagtgaagaaaatgagtaaggcgttttcgaatcaacttgtgctaaaggaagtgaacttacaagtagagcatggtgatatatacgctttagttggtggaaatggcgccgggaaatcgacattaatgaaaatattaacggggttatattcgtatgatagtggagaaatgtatgtgaaaggaaagagacagcagtttgcaaatccaaaagaagcacaccaagaagggatttatttaataccacaagaaccgctcatttttccgcatatgaccattgaagaaaatatatgtattggattaaaggggaatagaaagaagcttaaagtaaaagttcagcaattaattgacagtttaagttgggatattgatcttaatgaacagggagaatcgttatctattgcgcaacaacagttagtagaaatcgttagaggattaataagagaagctgagattcttattctagatgagccaacatcgacattaacaacacacgaaattaagagtctttttgtgttgatgaaaagtttacaagaaaaaggaattgggatgatttatattacgcatcgttttccagaaatctttgaaattgccaacaaagtagcaatactacgtgatggaatggttgtaagccaaggtgatgtatgtgactatacatatgacatgctgatggagggactattgccaaaaggatataaacagaaagagaaaatagaagtagttcaagagacagcaaagacgaaaaaaatattagaagtggttgatataaatggtcacgcattcgaaaatatatcattcactgtacatgcgggtgaggttgtaggtgttgctggcattataggatctggcagaacggaattagcagaagcgatatttggattgaaaactataaaatcagggtctatcttattgggtggaaaatcaattgatacgtgttctttgcataaaaggctagacgaaggcctagtttatgtgccagaggatagagtgaggaatggaattttctcaattgcttctgttaaagaaaatattgcagcagcaagtttatatcaaaataatcgcttttttataaatcaagaaaaagaaagcgctttagttaattcgtttatagaacagttccgaattgttgtacagaatatgaataaagaattggcatctttatcaggaggtaatcagcagaaggtcgtgcttgcgaagtatcttgcatgtaatcctaaaattattattcttgatgagccgactcgcggaattgatgcgaaagcaaggcttgaagtgtatgagacgataaaaaaaatgaaaagggaaggactcgcaattttattaatctcttcagatgttgaagaaattatccaattagtaaaccgtgtatatgtaatgagaaatgggcgatttgtttctcatatggaaaaagaacaactgagtgtgaatgaagttacacgccttgcatacggaggtgtaacggaatgaaacgtatgtataaaatgcacgaaacgtctatcatactgttactactaatttatatagctactgtagggatgataaaccctagttttattcaatttaactcgttatctttactgatgaaatcaagcgttattttagtcgtgctagcaatcggtcaatcgtttgtcttatttacgaaaaatatagacgtatcagttggctcaattatgggattaagcgcggcagtttgcgggatgttgttaacgaacgggtataatgcattcttgtcaatttttgctgctgtaatgcttggtgctagtattggtttcataaacgggattggcgtcgcaaagtttcgggtaccagccattattatgacattagggatgctaggaattgctaggggggcaatgttaatcttcacaggcgggaagtggattgaagatattccaaacgattttaagcagctgtcatctatcatcattcttggtttacctataactgtatggttcgttcttattattttactactactatacttctttttaagaaaagtgccattgggaagatacttttatgcggtaggtgataatgaagatggcgcgaggcttattggtatacctgttaataaagtgaagatatatgcgtttatgatttcaggcataagcgctgcgctcgctggttgcatatttgttatgaatatcgggttcgtcccaaatcaaacaggtacaggattagaattacaagtaatggcagccgctgtactaggaggaattcatttaaaaggaggaacaggatctttatttggagctgcattaggagcgttatttttagaaacaataagtagctcactcgtctttttaaaaataccagcattttggaataatgctatttcaggttttttactattacttattatcatattagatagcgtcatgaagaggtggaaagcagaaaggaggatgaatctatgaagtatttttacagatgggaaggtgtgttaatcatattacttcttatagaattcattctctttagttttataaatagcgatttcttaaatattagtaatctcctttttagtacaaatgatttcctatttatcgcaattgcggcgataccaatgacttttgttatagtaacaggaggaattgatgtatctgtaggatcaattatggggctaacctcgattttaattggtgtgttttggatgaatgggattcatattttactagcagtaataatggcacttatagtcagttgcttagcaggagctttaaatggactcattataaaaatgacagatgtagagccactagtcgttacactcggaacgatgtttttatacggaggaattgcgcttgtcgtttcaggaggggcaggtgcttctggatatgaagggataagcggtttacctgatacttatgtacaactagcaaatggtagttttataggaatacccaatttattatggctacttattttattaacaattgtatgcacgattttgtttcaccgaacgatatatgggcgccacgtacaattaacaggtgcgaatgaaaatacagcaaaatacaccgggattaagacgaagaaagtagtaatcattgcttacatactttctgggttaggaggtggattaggaggagctttcttaactgcatatttcggttctgcacgtgctgatataggaagcgaaacaatattaccaatcattacagcagtcgtcttaggcggtacacttattacaggcggaaaaggaagcattatcggtactgtactggcgagtattttcattgggctcatgcagtatggcttgcaaatgacgggtttaacaaatgaacaatccaatgtagtaataggtattatccttattctttcagttattatgagacatttcaaattacatcaatttttagcggggaaaagacagagtttgcataagggggaaatgtcatgaagagaaaactagggattgtattgatcgtatgtatttgcctaattggtttaatagcttgttccagtcaaacggcagataagaaaaaagcggatgatgtgaaatttgcatttattccgaaattaacaggagttggcttctttacatcgggcggtgaaggggcaaaagagatgggagataagctaggcgtacaagtgaagtatgatggaccgtctgaagcgagtgtatcagggcaagtaaagtatataaataattttattaaccaaaactatgatgcacttatggtttcatctacgtcagtggaggggctatcgcaatcactgcaacgtgctaagaaaaaagggatgacggtgttaacatgggattctgatgtgaatccgaaagatcgttctttttatataagccaaggaacaccagaccaacttgctaacttattaatagaaatgacttctaagcaaattggagataaaggaaaagtagcattcttttattctagcccgacagtaacggatcaaaaccaatgggtaacgaaagcgaaagaaattattaaaaagaaatatccgaactgggaaattgtaacgacgcagtacggtgaaaataatgcacaaaaatctttatccgtaggggagaacatattaaaaacgtatccagatattaacgcagttatttgtccagatgcaacagcactcccagcaatggcgcaggcagctgaaaacttaaaaatggataaaaaagtagtggtaactggattttctacaccgaacgttatgcgtgattatgtaaaacgaggaacagtacaacaatttggtttatgggatgtaaaacaacaaggtgctctcgcaacgtatgtagcaaatgaaattgttgtaaaagggaagaagttaaaagtaggggatagcttcgaagtaaaaggaattggaaaagtgaaagtagagccaaactccattcaaggatatgattatgaggcagaagggaacggaattatcgtattaccagaacgagttgtatttacgaaagataatattgataagtataatttttagtagacaaaaaaacgtccgaatatatcggacgtttttttatttctgcattaattatgaacagtttctttttcgtttaatccaagtgtacgaccagtagaagtgtgaagatcttggaacaatcttggattttcagttagtgaaatgccatatgaaggaatcatttcttttattttttcttcccattctaccatgcggcttgggaaacatttttctaatacttcaagcatgacgtgaacagcagtagaagcacctggtgatgcgcctagtaatgcggcgattgagccgtcagctgcacttactacttctgtaccaaattgaagtgttcctttaccgccagcatcagtatctttaattacttgtacacgttgtccagcaactacaatatcccaatcttcacttttcgcgttcggaatgaattcgcgtaattcttccatacgtttttcatgtgataacataacttgctgaattaagtattttgtaagtcccatttcttttacaccagcggctaacatcgttaagacgttattcggttttacagaaccgattaagtcaagatttgagccagtttttaagaatttaggtgagaagcctgcgaatggtccaaacagtaaagcttttttattgtctatatatctcgtatctagatgaggtacagacattggcggagcgccaactttagctttaccgtacactttcgcatgatgctgctctacaactttttggtttttacataccataaatagtccacttactgggaagccaccaatatgctttgattcagggataccagtcttttggagtagaggtaggctaccgccaccgccgccaataaagacgaatttagcagtatgatgctcaattttaccactattcatatcgtgtacttttacttcccacaaaccatttttcgtgcgcttaatattttcgacactatgcttgtagtttagctcgacattttttgtttttaagtaatcaaacaacatacgtgttaatgcaccgaagttaacatctgttccagagtcaatcttcgttgccgccatcggttcattagatgtgcgaccttccataatgagtggaagccatttttttaatgtttcaggagcatcagaaaattccattccttgaaacagtggattttttgaaagcgcttcaaaacggttttttagaaactcaacatttttttccccttgtactaaactcatatgaggtagtggcataataaaatcttgtggattacgaattaatttgctctttacaagatatgcccaaaattgtcttgaaagctggaattgctcattcacttttacagccttactaatatctatagatccgtcagctttttcggaagtatagttcagttcgcatagcgcagaatgccctgtacctgcattattccattcgttagagctttcttccccggcacttgcgagtttttcaaaaactttaatttcccattctggtgctaattcttttagtaatgagcctaatgttgcactcataattcctgcaccaattaagataacgtctgttttttgctgcatgttgctcatgataatctctccatcccctatattggcaaaaaagtgtaggtgttttctatgtctaagccgtaaaagagaaacaccgcctaggccccacctaggtgtataccttttttgtctcaattatataaccatctcatactctattataataattaatagactaaaatatctagtgttatctgataattttaaactatttaacgttttattcgctaaaaatcttatttaacaagctcttttaaggtggtaaatagaaaaaaattacagtttaaaattatctcgaaaaagcttacgtatccttaagtgactaaatcgagtacctttttatgggattattctttccgtaatggtaagattattctgaaaaataaaaaggagggactctaatgtgtacaaaagaacaaatttcaaacttatttcgaaacttttcaataaaggaatgtaaagggtcaagtgatttatatgaatatttatcaatgaaaattgctgaagatgaggaagtacttacactatcgtcctatgctcagataggtcaaccagtcccaaacttactattaggtgcagtacattatttattgctagcagggaaagaacatcatttaaaaacgtattatagtagtttagttgaaaatgctgatacaaatttagataaagcttttaatcattttaaagatttctgtaaagagtaccgagaagaaatcattactttgttacaaacgaaactcgttcaaacaaatgaagtaagacggtgcgcatacttatacccaagtttctgctacatatttaacaaagtgaagaagccgttagcgttaattgaaattgggacaagttctgggttgcaactgttctgggaccaatatcgttattcgtacgggacggatgaaatgtacggaaatatagattcaaatgtgcatgtaacttctgaaataagaggggagaatgtgccgcattttctaaaagaaagcccatctgtcgtagaaagaatcggactggacttacatgtgaatgatttacataatgaggaagattatttatggttacgtgctttaatttggccagagcataaagaaaggtttgagatgtttgatcaagctgcatctttagtgaaaaatgaatctgtccaattaatagaaggagacggtgtagagctattatcatctattattgaacaaataagtgaagaagctgttatttgtattttccatacacacgtcgcaaatcaaatacaagaacaagtaaaacataagttagaaaaacaaatacaagaaattggcgcaaaacgtgatgtattccacctgtataacaacatgtgggatcgtgaccttcatattgattattatattaacggaaacgaatatcgtgaaacggttggagaaacagaagggcatgggagatggtttagctggaagattggaaatgagacgcttatttagattaataggggcgccctcacttgtaaaagaagggaccataggctcaagcattgactaaatggttaaggaataaatgtattagtaacatacaaaaaatgcttcggagaaatcctaagcattttttgaattacatttaaaccccataatggatcatgtacttctgttctgctgtagcttgtacaatttttgaagctaactcattcagctcatcagattttctgaagaactttgaagatgtaactgtttcatagaaaattgctaaagattcagaagggataattgtaatccatcaacttgtgatccgataaagagattttttaacactttttcagcgtaaattttatcctctgtattcattcttgaattcctccttttcataaaaatataccttatatttttattgtaataaataaattttcatgtaaaatgaaccttttgtgaaaaacgagcgaatatagtgtgaaggatcatgagaggggaacggagctttggatgaagtacaattaaaagaatggctatataaacgaaagtatgttgtccaaaaaagagtttgagaaagtgttactttggattgttgaatagatatttagtaaaagaattaaccaataattatattatgtaaactttatttataaaacacccatttaaaaaatggatgttttatattttaatatattaggtgtaatatatagtttaaaaaagcggaatactttgcggaaagttaaaaatatttttcggatcatatttcgcttttacttccattaatcggtcaaagttgcaactgaagtatgcatctggccaatttttaatggataggtcaggcgtattaacgtagacaccttttgtaaatggaagcatcgctaagcggaagtcttcaacccatcgaatacttccagcggcaccttctggttgctcccaagtagcgaatattgacatgtttgatagtgcttttcggtaaaagtaagcagttgcctcatttggcacctcagcaacagcaccgcctaatccgtggaaaaatacggaggtggtggaaaagggaggtgcattattaataaagtgatcgataatggataatccttcttctggtaatagttcatatacatatggaccaacacttttaaatggtaaaggtgttgcaggttgcttttcagctattttcgctgctgcttctgcccatggtatttcttcgatagttacttgcattggtgaaccagcttctagtaatggctgtagtagcgactgcaattcttgtacagaaccgagaaatacaccttgcattaataatgatggttctaattctgcagacataaaaagagtagttgtaaatcgtttattagcgcaaggtagcgtatattcttgccaagaggttaatacaggttttaaatctgatatcccccagcttatttctgcaaatcctaccgtattaattttatgtgttcgaaacttaaacgaagtacatattccaaagttaccaccaccagcaccgcgcgaagcccaatagagatcgtagttacacttggcgttagcgcgtattatacaaccattcgcgtctaccatttctaattcaagtaaatgatcgagagttaatccaaacggacgagagagaatactatgtccgccacctaaagtaacacctgcaatcccgggagtaggacaaacaccactcggcacaactaacccttcagctgcaagtgtttcaattaaagaaatatttctccatccagtcccgatagttacagttccattattgtgatctatttctaattgtttcatttcacttacatcaattacaagaccagcattactgacggataatgcctcataattatgacgtccagagcgcatgcgtataggaacgttatgtagccttgaccagcgaacagcgtttactacatcctgcgtattttgagcaaaaacaatgattaacggaaatttgttgaagaatgtattgaattcttcacgcgctgaattataatcaggatcattaggtgtaacgatacgaccagtaagttcaattttttgattattcatttcagtcatctctccttgacgtgaaatatttataatgtggaaatacagaacataaagaagaactgacaatactttataagtaaatgaataaaggaaaaggattattccaataaagaaaaaggcagtgctacataagtagcgctgcctttttggaattatatgtatgtgctcaaaatttccccaggtaatccatcaatctcacaaactttctccgatgtaaaacctacacttagtaaaattttgcgagaagggatattattcggatcgataattgcttttagtacgtttacatctgtttgcttcgctattaaagctagttgttaatttttgattatgtacgtacatacaatatgtaattaagtgaatgaccatcatagtaattacagaaaagggtgaatacagcatatgaatcaatttgagcaaatgatgtacgttggtgtcatcatgtctattgtactatctgtaatgattttagggtccttatattataatcctcgactatcgttaactgattatccgaaagatattcaaaaagtagtttttccaaaatcgattcatgaaaaaaagcaaagcatttattttaatattgtatataatactattcttttcggtagtcctttcgtttctacatatatactacataagcatgaaaagttaatgtatatggatgcctatttacacacttttggtattttaatgattttcaatttagtagatttacttataattgatttgctaattttttgctggattactccaaggtttgttgtgattcctagtacggaaggtatgaaaggatataaagattataagtttcatttaagaggggctattgttgctactcaaattttagcaatcgtaagtttatttttggcgggaattgccacaactatttagtgtgaagaagggtatggagcttttataaaagataaggagatttataatatatagaattagaaatgagaatttgatagtattggagtaaggagttttaataacagtatattaaacaatattaatataccgttgcaaatgttttgatattatgtaaaattatacaattttacggaggcatttgataaaattcaaaaaaatttaatggaggttaatatgaaaaaagtaattggcgcagcaacagcaactgtttttggattgggagcgtttaccacaactgctaccgcagaaacaatcgtaacagcagatgtacttaacgtacgtgaaaaaccgactacagaatcaaaagtggtcgaaaaagtaaagaatgggcaagagttaaaagtcataaataccgaagatggctggtcaaaaattgagttgaatggtaaagaagtgtttgtaagttcggagtttacaaaagatgtatatcatgtaacggcgaatttgttaaatgtacgcactgaagcaaacacggattcagaaattcttggcagactaaaaaaagatgatgtaattgaatcaacgcatcaagtaaaagacggatggctgcaatttgagtataaaggaaaaactgcttatgcaaacgtttctttcctatcaagtacagcaccaactgaaaagaaaactgaagagaaaacgaagcaagtagcgaaagtacaaaaatcagttaaagaaaagaaagaagtaaagacgcagaaagtagcaaaagcgaaagaaacaacgaaagcacaagaaatagtaaagcctaaagaagagttaaaagtcaaagaagaagtaaaagttaaaaaagaagagaaagcgcaagaaatagtaaagcctaaagaagaggtaaaagtcaaagaagaagtaaaagttaaagaagaaccgaaagtgcaagaaatagtaaagcctaaagaagaagcaaaagtcaaagaagaagtaaaagcgcaagaaatagtaaagcctaaagaagaggcaaaagtcaaagaagaagtaaaagcgcaagaaatagtaaagcctaaagaagaggcaaaagtcaaagaagaaccgaaagcgcaagaaatagtaaagcctaaagaagaggcaaaagtcaaagaagaaccgaaagcgcaagaaatagtaaaagctaaagaagaaaaagcaagagaaatagcaaaagctaaagaagaagaaaaagcaagagaaatagcaaaagctaaagaagaagagaaggcaagagaaatagcaaaagctaaagaagaagagaaggcaagagaaatagcaaaagctaaagaagaagaaaaagcaagagaaatagcaaaagctaaagaagaagagagagcgaaagaagcatctaaaaacaacatacagtctgctaaacgtgaattaacggtagtagcgacagcgtatactgctgatccaagtgaaaatggtacatatggtggacgcgttttaactgcgatggggcatgatttaacggcaaatccgaatatgagaattatcgcagttgacccgaaaataatcccattaggatctaaagtatgggtagaaggttatggagaagctatcgctggtgatactggaagtgcaattaaaggtaatcgtattgatgttttaatgggttcaaaaagtaaagctatgaattggggaagacaaactgttaaagtgaaaattttatagtaacaataattatccaaatagaagtcagttctctttattgaggctggcttttatttttttagtagaaggataataggatttttaaatggcttattactaaacctgtaacaaaacataaaaattaattctctgttttgatttaaaagatgggagacttgctgaacttaaaagtaatgaactaaatattttaccattcgtttcatgcttgaactgcgcgatggtgtgggaaccgcaatattttcagttaagtgatggaggtaaaacagttcaaatcatacagcagcaaaatatagaagaatggataatggaagaggaatataagttaccagtttcattaccaaaaacaacggtaaagcttataaatatgaaaaatgaagatatacctatagatgaagatagttactgggaagcttttgacttgttcggttctgaatatgtatgtagattattaggggtaccgttatatgatgatcttccaaaggatttggcgtgtccaacttgtgcgaaagagatgaaatatgttgctacaattactcaagatattgaggaacgtggacttatttcagtagttaatttccagtttggggaaatgaatatatactattatttatgtatagattgtttaattataaaaactgaaatacaaaatacataacaagcctaacatattatgttaggcttgttttttgatcgcaacatcattaagaattgcatcaaatatatctttttgcgtaaagttatctgtaaaaatagtttctctggcaaccttaatagtatcgtgcggattataccatttttgtagggaatcttcaccaaattcgtgtcgtttgtcccttttgttatgtcgtctaatagtttcctctaatgataaatcaaagtaatatgcaaatgcattttcatcaaaataacgaattaattcttttaacatctcaccatacctatgactgttcaatataccttctaaaataacaaattcacattttccttttccgtacttcgtaatttcaaatagtaaatcatgtgataaattacccattgtgtcgtgtactctaagcatatctctacgtacaatatcctgtgatactaaaagtgtcccttgtccgaaatgttcttgtagttgttttgcaatcgttgttttaccacttgcggagtttcctctaagaatgattaaagtggatgtaaatataggattagacataatgtattccccccaaacagcattaattatatagaaaattttaacaaataaagtgaggaaagtgtataatcaatatgatggatatttaaggagggggtaagatgggggatatattaaaaaatgcacaacctatatggaaacggacttggtttcgttatctaggggcattttttattgttcagttactgtttattttgtgtgaaataactgggtgggtaccaaactttaggccaggcggagagttttttaatagaatattaaattctcaatttttcactgaatggttcacactctatacaatcccgcaatttaacgtatttacagcattttttgcgattacattactaccatatgcattagtaggtgcaatgaaagatgtaacagcaagaaaaaatataaaggaataatagaggtataatatgctttttcaaaaagaaggtttattgattagatacgtaatggaagatgatgcatctatcatttctaaatggttaacggacccagaagtcctgcggtattacgaaggacgagataatccgcaatctgtagaaaaggtgcttgatcattttatacatagtccaaacagtaatgaaaaaagatgtttaatagaatttgataccattccgattggttacatacaaatgtatccagtggattcagagtggaaagcgttatatggctataaagaatcacaaaatgtatgggggatggaccaatttatcggtgaaccagcctattggggaaagggaattggaacaaaactcgttcaggcagcaattacatatattatgggtgaaatgggagcagaagcaattgcaatggatccgaaagtaaataatgaacgggcaataaagtgttatgaaaaaagtggatttaaaaaagtaaagattttaaaggaacatgagttgcatgaggggaaattagaagattgttggatgatggaatataaacaataataatggcttatacaaacaaagggggatgtgtgaaatgaaaaaagcattaatcgtaattgatgtgcaagcgggtatgtatacagctggaatgccagtacataatgggggaaagtttttacaaacactgcaagagcttattagggaatgtcgttcaaatgatattccagttatttatatccaacataacggtcctaaagaccatccgttagaaaaaggtacggatggatggcgaatccatgcggccatcgctccgcaagaaggagataatatagttgaaaagacgactccagattcattccataatacaaacttaagcgaagtgttacaagagaaaggaattgaacacgttattctttcgggaatgcaaacagagtattgtgtagatacgacaacgcgcagagcatgtagtgaaggatataaagtaacgttagtgagtgatgcacatagtacatttaatacagaagtgttacgtgctgaagatattgtgaaacatcataacgcagtattgggagcgtttgcggatgttgttgaagtaaaagacttaaaagtggctgcctctaaataagaggcagttttcattagaaaaaatagcgtcaaatattgttagtaggtcggtattttgaaataatcacttatataatttcacgtaccataatgaaaaaatacaaaaaaggagcaccacataattaaaaagggcgctcctgcattaaaacgttacttttttttatctttatccaatatattttgttcttcagcaaactctgtaccatatgcaaagcggcgattaatacgaatgttatcattgttgtgccttgtatgagagttagagaagcgatgaacgattacttcagataaagtgaagacgatggcagaaaggatactgccccatgcaatttgcatatagttgtctaataaaatattaccgaaaatccatacgcttaaatatgttaataagaaatccgacataatggcaccagtattgccaattcgatttaaaatgattttatcaacgaacatgtaggatacgattgtaacaaagagactgaatgaaataatttgaacaaacgttgcagggaaaaataaagcaagcccaatgctaaatgcgataatgcacgatataaacttgataagcactactgtgaaatcattcaaaatttacacctccgatttatacatagtttttcaataaattctggagttcatacattgtaacggatttatttacataaaactttttcatgttcggaatttagtctaaatattataaaaacaatgaaaaaatgttatagtaaaatgagagtgtatgacatttttaggtaagggggaatccaggatgtggattacttcagaagtagaaattccagatgagttaattgatcaccttgagcaaggaaagttagtattatttgttggagcgggagtttctatgaaagggaaatcaaacttaccgaattttgatgatttagttgatgaaattgcaaaaacgttatatgtcgaaaaacgtgaaataacagaaccacatgattattatcttggtaaaattgcgaaaacaaaagatgtacatcaagtcgcaagagatcttgttcatatagagaaatcaaaaccgaatccattgcattatgcaattccaaggctatttcctttagatacagatatccgcattgtaacaacaaattttgatcaacattttacaacagcaattaaagaaataaatagagatatcaatgtttattacgctccagctttaccgactgggagagcttttaaaggtcttgcttatatacatggtaatgtagaacaggagaaagaggctttaattttaacagatggtgattttggaagggcttacttaacggaagggtgggcgagaagatttttagttgatctattctcaaattacaccgttttattcattggatatagtcataatgacccagtaatgaaatatttagcaactggtttaccaccaagtacaagacgatttgcttttgtcgcacaaggagaaaatacgtaccactgggaacatttagggataagaccaattgtgtatccgaataaggtgaataatcatcaatccctcgtaaaagcagtaaaacgctgggctgaattaatgggtgataattatattacgaaaagaatgcgtattcgggatattgtaacggttcccccgtcagtagaacaggaacaattatcatacataaagcaatcgattaaaaaaattgaaacagtacgttactttgtggaatttgctcatgattatgaatgggtcgaatggttagaagcagaaggtaaattacaaaatttgtttatgcttacgctaaactataatgaagtagatgaattacttgcagaatggttagtggaacaatttctttttagtcatcagaaagaattatttcaattaatttataaaaactattctaaaatatcaccgttattatggagaacaatttgtaactacttaaacgaaacgaagagtaagatggacccgctgttgtttgcaaggtggacactccttttattagaaacagctgaaaaagatagtagctctatagaaaagatttctaagttactgcaaaaatgttcttttcctgagcataaagaaattgccttattgttactaacttttattttagacggaaaactgaagttgaaacgtgtaagaaaatgggggaatgatacgcaagaatcaatagaactcgaggaatcgagtcgcttaccagtatctacattttctcatgtggagcaaatttggaacgaaaagatgaggccatatatcgcttattatgctgttccaattatgatgattggattagaaaaattgagaatgttgtcgttaagacaaacggcactgaaaaaaagaaataaggaaaatgtagagaaagagtttcatcaaaatgatcttgcatttttaatacgaattgtaaaagagtgtctaacttatttatgcgaaaacaatgaaaaaaaagcggattattatattacagaaatgatagaagcaaatagtgtacttaaaaagcgaattgcaattgatgcgatgaataaaaatatttttgttcgtgtagatgacaaaatgaaatggttgttacatgaaggacttcttttagatttcacttataaacacgaagtttttcaacttttaaaaaggcattatgcatattgtttagaaaaaacaaaagaagaagtcactcgaactgtaataaagcatcttacagaagagagggtatttgatgcatgtctcgtattagacttattattcaagtgtgattcgaatagcccatctacggcaaatgggtatgagttaatgaagcaaaagcatcctcattttcattctgaacgatacagtgtacaaaagaaagaagatacagcagaaagcattacttgtaatgtaactgctgacggattattgcagctgaaagatgttgaaattatgaagcaagttcagcaattttcgcaagatggtgtttttgaacaacgccattttttagagatgttatcaaaagcatgtaaattaaacacagagtggagtatttcatttgcataccaattagtaggagtgcaagaaataagtaatgaagtatggtttgtttgtattagagaatggcgaaataatcgaggattgacgaatgagcaaatccaaaaaattattccgctattgcagaaatttgttagaaatactgcttttcattggttaattagtagttttctatatgaaattagtaatcgactagaagagttagaagagaatagtatacgtgttgtaaaacgatttgctttttcagtgttccctcaagttatgaagagtgatgcagactttaagcttgggaaacaagatttttataatgaatcaattcagcatccagttggaaaaatgacggctgtattattaaagttgttatcatatgatcatttatacgatcgtaatgtatatgaatatttatttttatttgaagaacaagtaagagttaattcggaacgaacaaactttatgtttgctcgtttaatagcagatattacatttctatatcatattgaaaaacaatggtgccgaaaatatttgttaccatacttagatttaaaaaaacaaaatgagattacggaatatgcatgggccggcttatgttacacgcaaataaatttacctttatttacagaaatgaagcgatttattaagtatgcgatagaacatttggaagtattacatccgcatacgagagaagctttcttgaagtggcttagctttgtatttattaaatgtgtactatattgggagcaaaaaacaaattggttatacccgttactcatactagaaaatgaagaaaataaaattaagtttatgcagtttttatgctattacgtcaaaacattaagtgtaaaagaacaacaaaagttttggacagcttggctcagtgtatttttgcgagaacgaccaaaaatgggtgagataactgcgagagaatatgtgatgcttttacgtattattttatacatggatgaaatattagaaaaaggattatgtattatgtctcgtgcattttcaagtgtacaaggtaaatgtacaggtgaggaaatgaagcggttattgattgaaatgcttcataaaaaagaaagtatgaaagcgcataaagaaatgtttgcaaatgtgttttttattttactacaaacatgtcacgaagccgttttatttgaaaaagaaatcatacaaataaaagaattattagttcagtatgaagtagaggaatatgttttacatttactagaaaatgaaataattcgcataggaattgtaatgggtgatttacaaaaagaattatagaacgaaagtggaatttaaaaaaatatataaaaagttgttgacagtgttttgaaaagcgttctataatacgaatcatacttattcaatttcaaaaacatttgaataaacaaagtgcaatgaagagatcacagtagtggttagtcttactgtaacagagagctggtggttggtgtgaaccagtacagggataatcatgaattacagtcttggagcatctttttcgtaataaagatagtttgtctttatgaggaaaaagcggtcaattgatcgttaacagtgaagagaggtagacggaaagttagtctacaactagggtggtaccgcgataaatatcgtccctactgatttattcagtagggactttttgtattttagtggttcaacttgaaaattaaatagtcatgcattgaaaggaaaagcagtagttgttgtttccctgtaacagagagctggtggttggtgcaaaccagtacataaacaagagcgaattacagtcctggagcatctttttcgtagtaaagatagtattgtctttatgaagggaaagacggtcagatgatcgttaacaatgaagagaggtagacgaaagaagtctacaactagggtggtaccgcgataaatatcgtccctactgattgaatcagtagggcttttttgtacaaaaaagtgggtttttaactagtagttcatgtctttgtacgaattattagtttaaaataagaagaggtatcgattccactataaatttgtataattagtcagttcagaaaatagagaattttttattctcttactatacttttaaaacattagaggaggatttccaaatggcaaatcatgaattagatcaattacgtaaacaggtagatgaaattaacttacaactattacaccttttaaacaaacgtggtgaaattgttcaaaaaattggagagcaaaagcaagtacaaggcacgaaacgctttgatccagtacgtgagcgtgaagtacttgatatgattgcagagcataacgaaggaccattcgaaacatcaacagttcaacatattttcaaaacgattttcaaagcaagcttagagttacaagaagatgataaccgtaaagcgttactagtatcacgtaaaaagaaacaagaaaatacaattgttgatgtaaaaggtgaattgattggaaacggaacacaaacgttcatcatgggaccttgtgcagtagaaagtttagaacaagttcgtcaagtagggcaagcgatgaaagaccaaggcttaaaattaatgcgcggtggtgcattcaaaccgagaacttctccatatgatttccaaggtttaggagtagaaggacttcaaattttacgtcaagtagcagacgagtttgacttagcaattattagtgaaattttaaatccgaacgatgttgaaatggcattagactacgttgatgtaattcaagttggcgcacgtaacatgcaaaacttcgatttattacgagctgtaggtaaagttaacacaccagtattattaaaacgtggattagcagcaacaattgatgagttcattaacgcagcggaatacatcattgcgcaaggtaacgatcaaattattctttgtgagcgcggtatccgcacatacgaaagagcaacacgtaacacattagacatttctgcagtaccaattttaaagaaagaaacacatttaccagttatcgttgatgtaacacattcaactggacgcagagatttattattaccaacagcgaaagcggcacttgcaattggcgcagatgcagtaatggctgaagttcatccagatccagcagttgcattatcagattctgcacaacaaatggacattccagaattccatagattcatggatgagttaaaaggtttcaaaaataaattatcttaattccatatcatatatgcattgaagaggaaacagtagtgcttatctcactgttaaagagagctgatggtcggtgtgaatcagtacaaaggtaagcatgaattacagccttggagcatctttcccgacaacttttggagggtaagacggtcgaacgatcgttaaagaagaagagaggtagacgaaagaagtctacaactagggtggtaccgcgataaacatcgtccctactgagcgctcagtagggacttttttgtacaaaaaaatagtaaaggggcaagagaaatgagatacattacagctggagaatcacatggaccgcagttaacagttattttagaaggtgtaccagcaggtttgacacttacggcggaacatattaataaagaattattaagaagacaaaaaggtcatggacgcggaagacgtatgcaaattgaaacagatacagttgaaattgtaagtggtgttcgtcacgggatgacacttggatcaccgattacgttaattgtaaaaaatgatgatttcaaacattggacgaaagtaatgggtgcagagccaatttcggaaaaagaaagtaaagacatgaaacgtacaattacaaaaccacgtcccggacatgcagatttaaatggagcaattaaatatggtcatcgtgatataagaaacgtattagagcggtcatctgcaagagaaacgacagttcgtgtagctgctggtgcagttgcaaaacaaattttaagcgaattaggcgtgggaattgcaggacatgttcttgaaattggtggagtaaaagcaaaacatatttcaaacttatcaattgaagaaattcaaacaattactgaaaactcaccagttcgatgtttagataaagaagtagagcaagaaatgatgaatgcgattgacaacgcaaaaagtagtggagattcaatcggtggtattgtggaagtcattgcagaaggtatgccgattggcgttggtagttacgttcattacgatcgtaaattagatgcaaaacttgctggtgcaattatgagtataaatgcatttaaaggtgctgaaatcggcgtaggttttgaagcggcacgacaaccaggaagcaaagtgcatgatgaaattctgtgggatgaaaaaaaaggatacacgagaaaaacgaataatgccggcggtttagaaggcggtatgacaacaggtatgccaattatcgtaagaggcgtgatgaagccaattcctactttatacaaaccgttagcaagcgttgatattgatacgaaagaagcattccaagcgagtattgaaagatctgatagttgcgcagtaccagcagcgggtgtagtagctgaatctgttgtggcatgggaacttgcagatgcactagtcgaacaattcggaaaagatcgtatggaattattaaaacaaaacattatgcaacacaataactacgcaaaagaattttaataaaaaggtgggtttaacgtgcaagtaaaagatcaactatcatcattacaaccatataaaccaggtaaatcaccagaacaaatgaaagaagtgtacggagatcattcgtttgtgaaattagcatcgaatgaaaatccatttggttgttcaccgagagttttagaagagttgcaaaactcttggttggaacatgctttatatcctgacggaggtgctacaacgctccgtcaaacaatcgcagataagttgcatgtgcaaatggaacaagtactttgtggtagtggtttagatgaaatcattcaaataataagccgcgccgtattacgagcgggagataacattgtaacagcaggtgcaacattcccgcagtaccgccatcatgcgattattgaagggtgtgaagtgaaagaaattcctttaaataaaggtgtatacgatttagacgaaatttcgtcagcggtaaataataatacgaaaatcgtatggatttgtaatccaaacaacccgacgggcacatatgtgaatgagcaaaaattaactcgatttattgaaggcattagtgaaaatacgttaattgtcattgatgaagcgtactatgaatacgtaacagcaaaagatttccctgagacattaccgcttttagaaaaacataaaaacattcttgtacttagaacgttttctaaagcatacggattagcttctttccgcgttggatatgcgatcggacaggaagagctaattgagaaattaaatgtcgtacgtttaccatttaacgtatcttcattagcgcaaaaagcagcgacgattgcttttggtgatgacgagtttattaaagaaatagttcacatgaatacagaaggattacagcaatacgagagtttctgtaaggaaaacggtataccattttattcgtcacaaactaatttcatcttcttaccggtagataatgctggagagatttatgaagcttgtgcacatgcaggatttattattcgtccgttcccgaatggtgtccgtattacagttggaacaagggagcaaaatgaaggggtgatttcagtgttaaaacaacactttgaaaataaaaaaaataagtctcgagatgaggcaaatgcgtaaaaaggtagtattaattggaacaggtttaataggaggctctctcgcattagcaattaagaaagagcacgatgtaacgataacagggtacgatatatttaaagagcaagtagagcgtgcaaaagaattacacgtagtagatgaaataggagttgatttacagcgtgcatgtgaagaggcacatttaattgtttttgcttctccagttgaagaaacgaagaagctattacacaaacttgcgtcattccgtttacgagaagatgttatagtgactgatgttggtagtacaaaagggtctattatgaacgaagcggaagctttattttcaaaggatgtttctttcattggtggacatccgatggcgggttctcataaaacgggagttgaaagtgcaaaggcacatttatttgaaaatgcattttacattttaacaccgatgaatcacgtgccaaataaacaagtggaagaccttaaagtatggttaaaaggaacagggtcacattttcttgttttaaatacggaagaacatgattatgtaacagggatcgttagtcattttccgcaccttatcgcagcaggtttagtaaagcaagttgagaaacatgcaggagataatccgctcattcatcaactagctgctggaggtttcaaagacattacacgtatcgcatctagtagtccaaaaatgtggagtgatattgtaaagcaaaatcgagagcatttaatggtattattaaaagagtggatctctgaaatggaagatttatataaaacagtttctaccggagatgcaggcgagattcaaaactattttgcagatgcgaaagaataccgtgattctttaccagtaagaaagagaggggcaattcctgcctatcacgacttatacgtcgatgtattagataaggtgggggcattggctcatattacgagtattttagcgcgcgaggaaattagtattacgaacttgcaaatattagaagcgcgtgaaggactgcttggggtattacgtattagcttccaaagggaagaagatcgtatgaaagcaaagctagcgcttggagaagaagaataccaaacttatgaaacaatttaaatgagaaggtgaaaaacgtgaaagaaagaacaatacaacctgttaataacggattgaatggcaatattacaatcccaggtgataaatccatttcacaccgtgctgttatgttcggttctattgcagaagggaaaacaataattagaggtttcttgcccggtgcagactgtttaagtacgatttcatgttttaaagaaatgggagtagaaattacgcaaaacggtgatgaggttactgtagttggtaaaggattagaaggtttacaagaaccgaaagctgtattagatgttggtaattctggtacaacaatccgattaatgtcaggtatattagctaacacaccatttttctcttgcgtacaaggtgatgaatctatcgcaaaaagaccgatgaagcgtgtaacaaacccattaaaacaaatgggcgcaaacatagacggccgagaagaaggaacatttacaccgttaacaatacgtggcggcgatttaaaagcaattgaatatatttctcctgttgcaagtgcacaagtaaagtcggctattttacttgcaggtcttcgtgcagaaggtgtaacagctgttacagaaccacatatttcacgcgaccatacggaaagaatgctcgaagcatttggtgttaaagtaactcgcgaagggaaaacagtgaagctgtcaggtggacaaaaattaacagcaacagacattcaagtgccaggtgacgtatcatcagcagcgtttttcttagtagcaggtgcaatcatcccaaatagtaaactagtattacaaaatgtaggaatgaatccaacccgtacaggtattattgatgttttagaaaaaatgggtgctacgttcactgtagatctaattaacgaagaggcatcagaaccagctgcaaatattacaatcgaaacatcttcattaaaaggaattgaaattggcggagatattatccctagattaatcgatgagattcctgtaatcgcattagcggcaacgcaagcagaaggaattacagtaattaaagatgcacacgaattaaaagtaaaagaaacaaaccgtattgatacagtcgttgctgagttaacgaaactaggagctcgcatagaagcaactgatgacggtatgatcatttacggaaaatcagctctaaaaggcaatacagtaaatagttatggtgatcaccgtatcggaatgatgcttgcaattgctggctgtttggcagaaggaaaaacaattattgaagatgcagaagcagtaggtgtatcatatcctacattctttgacgaacttcaaaagttagctaaataaaaagggtggaaagcagatacgtgatgtatctgctttttttgttaaaacgtccttgtaatttcacttatcgaactataatagtaagaattatgatacaattcaaacagagaatggaggagaattatatgaatgtcatacaattaaaagaagataagtttagagaagcattacgtttatcagaatacgcttttcaatataaagtagatgaggaacgattacagcagcaacttacaaaaatgaaggaaagtcatgaaatatacggcattatggaaggggaagacttagctgcaaaactacacctcatcccgtttcatatttacataggtaaagaaaaatttaaaatgggtggcgttgcaggagtagcgacgtatccagagtacagaagaagtgggtatgtaaaagagctacttcaacattcacttcaaacaatgaaaaaagatggctttacagtctctatgttacatccatttgctgtttcgttttaccgtaaatacggctgggaactttgtgcgaatctactcaaatgtcatataagtaagagcgatttagtgatgaaaaaacaagtaaatggtactgtgaaacgttttaataaagaaaatcatccagaagaagtcgagaagctctatgaagcatttgcagaacgtttttcatgtatgttagttcgagagaagaactggtggttacaagcggtttatgatgatttaacattagcgatttactatgatgaaaataaaaaagcagcaggttacatgttatacaaaatagaaaactataaaatgacagtagaagaatttgtaccactgcataatgaagcacgaaatggtctgtggaactttatttgtcagcatgattctatgattaaagaaattgaaatgacagtaagtgaaagcgaaccgttattatattcattgcaagagccacgcgtgaagacagaaataaaaccatattttatgggaagaattgtagatgtagagcagttcttaaaacaatatgagttgaattggaacaatgtagagcaagaagtgatcctaaacattacagacgcatttgctccgtggaataacataacagtgagacttgcaaatcatgaaataacaataataaaagaaaaaacaatagataaaggcatcaaactggatataaacgagttatctacaataatgttcggctataaacgtccgttacaactgaatgaattagaattaattagcggaagtgaagaggaaatacaagcgtttgagaaaatagttccggtacgagaagcatttatttatgatttcttttaagttttcaatagaaaattgggctgcccaaaaacaatttttgggacagctttctctttggttgtcggtaagtcgatatatcctgaaaatcgctgatataattggagatgcgccgatatattctgaaaatcgctgatataattagacttgcgctgatatattctaataatcgttgatataattttttcactaaaacgtaactatactttgtcacgcacttgacttttaatccatgtaatttataattaaaaacggaatgaattttcattcctggaaatagaggtggaaaaaatggctaaaaacaaacaagaggatatttttgatgctgcgatgcaactttttgcagagcgtggttacgatggtacgacaattccaatgatcgctgaaaaggcaaaagtcggtgcgggtactatttatcgctattttgaaaataaagaggcacttgttaactcattattttcaaaaagtatgttacagctttctgaaataataaaaacggattttcctgttgaagcaaatattcgtgaacagtttagtcatacgtacaaccgtttatttgaatttgcgagaaacaatgtagatgcttttttatttacaaattctcactgtgatagttattttcttgatgaacagagtaagaaaatatttgatgattttataggcttctttatgaatattattgaagatggaatcgcaaaaggttttcttcgtccattgcctccagttgctttaattattattgtatatcaaccgctagaaaaattaacgaaagtaattgcaacagggcaattagaatactcgaaagagttagtaaaagaattagaagaaagctcttggaacgctattagaatcatttgattctatagctttataaggaaaggaatgaatattcattcctaaatagatttaaaaaatgagagtaggaaaggatgtttgtgtaactaagggaatgaacattcattccggaaagactagtttaatagaatttacaaaataatgtaatagaacaataggaatgaacgttcattccgttactaacgtgaaactttcaaaacgggagatgattcaaatgagcaagttaaaaagttggagaagtttatcttttctattatggatagttattactattacaatggtcgtaacgatgcctaatatggatcaattagtgaaagaaaaagggaaaattacaatccctaatacaaagcaaagcagtattgctgacaagatgatgaaagagatggataaagaaggggttgaaaagtatgaaattatagccgtttttaatagtggcaataaggcagctttaacagatgaacaaaaaaaggaaataacaaaaacaatcaacgccctgcaaactgaaaaagagcaattaggaattaaggaagttgtttcacatttagacaataaagacttggagaaacaattagtttctaaagataatacgactattttaacgcaaatatcgatagataaaaaacatggtgaaatatcaaaagtttcaaataatcttcatgaaaaagtgcaaacgaaaggggtaaaaacgtatttaacaggaagtgacttaatagcgggtgattttcttaaatcctctcaagagggagtgaaaaagacagaagttatttcaatcattttcattcttgtagtattaatcctcgtattccgttcaccagttgttccaattgtttctcttcttacagttggtatatcgtatttagtttcaatggggattattgcccagcttgtagatcaatttaattttccattctcaaactttacacaagtgttcgtagtcgtcgtcctgtttggggtaggaacacatgcccatcaacttaaggatagaaactctacggttttccattaattgaaatgaacaaacttttaaacagtataatctatcataaacctttaataaatactgatttatgttctcttttcgtagttcaactacttatagagaaacgtgtcgcaccgggatacccattacgaatgctaatggtgagaaaatatatcctaaaatagcttggaatgtaataccgaacattgaatcaaacaagctattaattgctgtaattaatgctacaaaaccaagtaacatagctgctactgtaatcgcaatcgtgaaaccaagcataatgtactcgcttagcatttcaaagaatgattgttttttcttattttctaatttcagtgtatcttcttcttctgtaatatcgtacgggttaataatatgaatgataatgaaaccactaaataaatttaatacaagtgctgttactacatatttcggttcgatcattttcatataagaaccaacgattgacatcgacactgtcgacatagaagatgcacataatgtatataaacgatgttttgggattttacttaattgatcttttactgtaataaatacttctgcttgtccaacaatggcagctgctactgcattatatgattctagttttcctagaccatttactttacttaacaacgtaccaatagcacgaataaatatcggtaaaattttaaagtgttgcagaattccgattaaaaccgcaaagaatacgattggtaatagcgctgttaagaagaatgaaacctctcctttattaacaagaccaccaaatacgaaaacgattccagcttccgcatatccaagaagtgcgccaaatccatctgaaattccttttactaaaatataaccaacttgcgtatttaataagaaataagataatgctagctgaataataagcataattgcgattggtttatacttaatcttctttcgatcggcacttataagaaaaccgagtacaaatacaacgagtaatcctacaaggaacataacaaacttcattaataaaatcctccatttaactcttcattaacgttgaacgtctgaccattcaaaacaagaaataatccgaactttccatttctcctccgtaaccttcgattggataggaaatgtcataaaaactcttgtttcaaaggcattttccattctaacataaatcacaactcatatccgcacttttctttaaaaaattacatttaattatgaaatgctcataaatgttcgtcttttaccatctataaacaactggataaaacaaaaaatgagcatcaagtttcacttgatgctcacctcattatactgctttttctttatcagctactgctgacttatcccagcactctgtatttttcaaacctggaatagaatccgcatagaataccggatctttcccttgtttcttttgatttacgtaatctgataatgccgcaaaagcatacttagagaggaatacaatcgccactaagttaataacagccataatacccatgaataaatctgctacatcccaaacgatttgaattgtcgctacagatcctaacataaccataccaagtacagcaatgcggtacgctgttaatagcactttacttccatttaagaattcaatatttgtttcaccatagtagtagttacctactaatgaactgaatgcaaacaagaagattgcaactgctacaaatatagaagcccatggaccgatatgttgacttaacgcctgctgcgttaattgaattccatttaaatcagctgcattatgcacatctgataaaagaataataaatgctgtacaactacaaattaataatgtatctgtaaatacccctaaagtttgaataaaaccttgtttaactgggtgcgttacgttcgcagtcgctgctgcgttcggcgcactccccatacctgcttcatttgagaataatccgcgttttacccctagtaaaatcgcggctcctagtcccccacctactacttctttaattccgaaagcatgtaagaaaatctctttaaatacatacggaattgccgtaatgtttgttacgacaacgaataatgccactgctacataaataattgccattactggaacaatcatttcaaccgcgcgtgcaattcgttttactccaccgaaaataataactgcaagtaaaccagccataacaagaccgactaatctactatctgttttgaatgccccatcaaaagctgccgctacagtattagactgtacagcattaaaaatcaatccgaaacttactgttattagaacagagaacacaacacctaaccagcgtttatttaaacccttttccatataatacgctgggcccccacggaatgcattcccatctttcactttataaatttgcgctaatgtgctctctacaaatgcagaagcacccccaattaccgcgattaaccacatccaaaatactgctcctggaccacccgctgaaattgcgatagctacaccagctaagttaccagtacctacacgagaagctgtactcatacaaaatgcttggaatgatgatacgccactcttctctttttgcgcttttctcgttttcgagcttgctccatccccaagtaatcgaatcatttcaccgaagtaacgaacttggacaaatttcacacgaaatgaaaaatagagccctaacccaattaacatcgcaataatgacatatgaccaaaggatattatttacatccccaattaccctagctaaaaaatccatatttgcattgccccctcttcctaacaataagaaaattatattctaaaaacttttagtaatcaagaactttatgttaggtttcatgacatgaatacgttaactatattaacatacttgtttttttcataaaaatatagctattacatgcatttatccaatactcaatctcttatcctcttcgcccagccatacttttaaaacagtacgttccccacaaataacgagaggaacaaacaaaaaagttatattaataattacccctcacccttttcatcatttactacaacaaaaaaggcgagcatcaaatttacctcgatgctcgccttttcaattacactgctttttctttatctgttaccactggcttatcccagcactctgtattcgttaaaccaggaatagaatctgcactgaagactggatctttcccttgtttcttttgccttacatagtctgttaatgccgcgtacgcaaatcggccaagaagtgtaatcgcaattaagttcgttattaccattagacccataaataagtctgccatattccatacaacttgaagcgtcgcaacagaaccgaataataccattccaactaccgcaatacggtaaattgttaaccacgttttgctttgcttaataaattcaatatttgtttcaccatagtagtagtttcctagaagtgaactgaaagcgaataagaaaataataatcgctaagaaactgctcgcccatgggccaatttgtgagcttaatgcattttgtgttagttcaataccttctaaattcgttgctttatatgcaccagaacatagtacgataaatgctgttgatgtacatactaagaatgtatctactaaaaccccgattgtttgaataaaaccttgtttggctggatgcgttacatcagctgttgctgccgcgttcggcgcactacccatacctgcttcgttcgcaaataatccgcgctgaataccatatttcatcgcagcaccgataccaccgcctacagctgaatctaaaccaaatgcacctttaaagatttctgtaaacacatctggtagtaaatagaagtttttaataacaacgaaaatcgctaccgcaatataaagaattgccattggcggaacaatcatttccgacatacgtgcaatactttttacaccaccaaaaataataaccgcaactaatactgctaatacaatcccaacaacgtaacgctcaataccaaatgcatttttaaacgctaatgtaactgtgtttgcttgtactgagttgaaaattaaaccgtaactaattgtaatcagaatagagaaccaaatccccatccaacgtttatttaaacctttttccatataataagcaggaccaccacggaagccactgccatcttttattttataaatttgtgcaagcgtactttctacgaaacttgaagaagccccgataatcgcaataacccacatccaaaatacagctccaggtcctcccatagaaatagctaacgctacaccagctaagttcccgataccaatacgagctgcagaactcatacaaaatgcttggaacgatgacacgctaccctttttacgtgtctttccagttagtccatcactcattaaacgaaccatttcccctaaatgagtaatttgtacgaatttcaatttaatagaaaaataaagacctaaaccaattaacattgcaataagaatatatgaccaaagaattgtatttgttgatgaaataaattgctctaaaatattcatacaattaacccctccttttctccataaaacgaattatatttaaaaaacattcaaaaatcaacatttttcgacaatttgcaatttccaaatattagccaggttcacagtaacaatatctttatgactgactaccctccctctaactgtacatactaaaacaaaaaataaattcacaaacaaccctattgacaaaaataccaacccgtaactataatgattacaacagtttgtaacaaacctaattacaacaaattcatttactttcagatatacactttaacaaaacactttggagggatttattatgaaaatcggaattatcggagcaactggtaaagcaggaagtcgtattttaaaagaagcattgaatcgcggacatgaagtaactgcaatcgtaagaaacgctgcaaaaattacagaagaaaacgtaaaagttttagagaaagatgtattctctcttacatctaacgacctgcaggcatttgacgtagttgtaaatgcattcggtgctccagcaggcgaagaacaccttcacgtagatgcaggaaacgtacttattgaagctatgaaaggtgcaccaaatacaaaattacttgtagttggaggcgctggaagcttatttgtagacaaagagaaaacaacacgtgtatttgagacaccaggtttcccgaaagaatatcttgcaacagctcaaaaccaaggtaaaaacttagaaattttacaacaaacaaatgatatcacttggacattcatcagcccttctgcactattcgcattaggaaaacgcactggttcttacaaagctggcaaagacaatcttcttgttaactcaaaaggtgatagctacgtaagttacgaagacttcgcagttgcagcacttgatgagattgaaaacccaaaacatgtaaacgaacgcttcacagtagtttctgaagctgaataataaaaaaagctcgtaaaacataatgttttacgagctttttcttattattgcacttgctctaaaccatttggagtaatcttaaaggaaatttctttaaactttttcttatctccttttccaactaactcactctttttataccaacttaaacgatctgactcggcatgatacactttcaatacgtcaccatactcgaacgccataccatttacttgttctgcaaaattctgcgaagtttcttgtccttctgcggttacatgctttttctcagttccattttgatcataaatcgtaaggcctatatactgttcatttacaaagcgataatgaatctcatcatttgtaaatgttgcatgtaatttcttttcagcgtggtttaacgtaataattgaacgtgtaacatcggacacaccttgatagactagactatccccatatgtcacctctacaggaacttccgtcactttcttatttccaaatcgatctttcgtttctacttttactgtttgctgaccaatttttgtcgtatctattttccctacaaaacctactacttctccaccctgtacttcaacaaagttcttcgcgtctagcgtttcgctatttgttccgattactacttgctgcggatttgcttttactgtttgctcaccgtctaatctttcaaatccattttcagttattttgaagactaattcctttatctctttactttttccttcgcccacatatacatctttttgataccaatgtaaacgagaagattccgcatgatatactttcactacatctccatactcaaatgcaattccatttacctccttagcaaattcttgcgtattctctaaaccttttactgctatatttttcttcactcttccttctttatcgtacaatgtgaattcaaaatacttttcatctttaaagtaatcatgaattaggttctttgtatctgtcgcactcagttttttcgtatcatgatgtaaagttacaattgattttaagtcaccatctctatagctcagcccatatacaagtaggctatctccatatgttactgttagaggaacttctgtcactttcttatttccaaatcgatctttcgtttctacttttactttttgttctccgatttttgatgtatttggtttttctgcaaaaccaaccacttctccatcttttacttgtacaaattctttcggatctagtttgtctacatccattccgactactactttttgcggtttcgccgtcacttcttgtaaactctcttttaattcgaacccttgctcagtgatttggaataatttctcttttttatttttagccttcccttgatctacaagtgtattattttggtacaacttcagacgatccggttctgcatggaatacttttactacatcaccatattcaaaatccaattcatttagttccatcgcaaatctttttcccgtttcttgtccttctgcagatacacgtttcttttcaatcccatttcgatcatatagcgttaagcccatatattcttctttttcaaaacggtaatgtatttcattattagtaaagtttacatttaatttcttcttattgtggtgaagtgtcactgtcgacattacatcatctgaaagtccttgaaaaactatactgtcatcataaaatccgttaacttggacaggaattgaatttttatttcctttctcatccccaatttctactaacacttcctgtttaccattctctagtttaggccatacaatctttcctgttacttttacattctcacctaaatttcgaacaagtttacttgcttcattctcgtcagaatctgtaccaactaaaagattttgtacttcattagcaggttcaccatatggaaccttatacggttcaacttgcttctcacgaatatcattactatctgtagctttccagatttccttttctaatttaggtaactttgatttttctattttctctctaatatcatcatttggtgttaatccccattcctcaaagaaaggaattaaattttgccctgccacttgcgatgtcatataaataaatagctgctttttctcttcatcagaatgaggcatttcactctgaggtaacaaacgataagcttgatgtaacctaggataaaaatgttctccatacactacatttaattgccaaaacattgtaagaggattaatgtcatcaatgaatctttctgctttaggcttctctaaatactcaaatgagtttttatagtgctcatccatttctaattgattccctaacgccttttgaacagctaatgagtaaatatttactgttacttcccttactttagaccacttccacggttcttgctgatgtaaatgaccaacttcatgccacggtccccatccatccttctcaagtacctctatatctaaaactctattcattgcagttggaatatatcctgtatgataatgttttgcaaacataaagtcccctttagcaggcttccgtttttcaacaaactgaacataatgagttggagattttgcaaacccaacactgtcctcagataatcctgccactgcgttttctaaacggataatcttatcatgcaatttcattaaatctgttggatccgtattcttcatatatttctgcacagaatcgtaagtagtagtaattaagcttctctcaccttttaattcaactgcataaggatccttatatttttttaacatttcatcccaatctttttttgtatgcttacctaaaataaataaaggaaagtgactaccaccatttgtaacggaagctgttacttctccttcgttattcatattataaaaatataaaataccgcctcttgaagatgaaataacatttttccctggttttaaattaaactcctctgggtccttttcatcataagatctcgttccaataaaagcttggatagactgcgttccttttatgtcaattgtaatctcttcatttggctctgcataaattccagtcggttcattagcggaaagtttccaagtaactcttaaacgattattttcttctacgctacctttccccggcaactgaaatactctctgctcaaacttattctcttttacctcttctaatttcccacctttattttcttccaaaggtgctgcatatcctttcgatgcttcgaaagctactggcgataataatgtagatatacatattccagctactaataccctactcgtctttttcttcgacataatctgtgtcccctgttcctttatttagataaactaccctatatattcatctaataagtaatcctattattcctataaaaacatttgatgaatggactaacacctcgcgcacctgtatatattactaccgcatttctctccatgcattcgctttcttacattgtaaaatttatatgtaatatgccctcctcacttctctctatttgtgatgagttctcttgctacataaaaaagagaatagtaaaagatatttttcagtattgtcatctatacatctaaaaataacaataaaaacttacattttcttcatatatgaccatctataggtagtttttccaaatgaattttacacgctttacactttgtttgatagcctctctaattagaataatgttacaatttcgtgaataaaatctatttattgcaacgtttagattttgtcacattttattatttttaaatactttttaaaacgttaaaatagtgtttcactcgattaattattatcttgatatacctttaaagaattcatataaaaaagcattggcatacgccaatgctttttcattatctcttttgattcggtttatgcggttcatttggagtatatggcttatttggtttatttggagcctcagcctttttccaacttaccgctaactctggacttgttttttcttcactacgctcaagtaatactactgcattttgaatagtcgatgtacctttatgcgcaatcccttgtaatttcgttaaatttcctgatactttaaagctaaatccaccagctggtgtttgttttggaattaaaatgcggaacttttctcctacattaaattctgtttttgtttcgcctttttcatttgcaaatttcacgcccgctggtgcacctgttgcttgtactttatacgttccgctttttgcatttgtttctactgtatataaacctgtttcaaagaaatcattttttaatactgcttcttgttcttctgtaggagttacactcatcgtaatttcttgtaactcttcactagcgcttgcttttgcaacgatgtctttcgttactttctctacatttttattgcggaaatctaaatcattaatatcgatttgttttaacgcattccacactgcaagctgcgttgcgtaatgtgcttctctccaatcagaaacacctaattcttgtggactcttttgtggatatccattcaatagtacacggtatacgttaatatccactttccccatttccggtaaatcttgaccgcttggagatttcaaatctacatttaagcaaaaagcaattttgccatctgcggttttaataagctctgttcgaattggtttcttctttgacttactataactccaattcatttcatactttgtatggtccataacttctgcaaatgctttttgaagcgggaataacacaaataaaacacttaaaaacatagctaaaatcttgaacgattgctttatattcatgtttacagccccttatcacaaacttaatactaagtagtatttatttagaaactatttttatgcacaaaaaaagagtgcttttacgcactcttctttcttactttaatcttagaaatcgaagttatcaggatctggaccaacgcggtgattttgatttaacgcatcgattttttccatatcttctttcgttaattcgaaattaaatatatcggcatttgcaataatgcggtgttctttcgttgattttggaatagtgattactccattttgaagatcccaacgtaaaataacttgcgctgttgttttaccgtgtttctcagcaatttcttgtaatttttcgttatctaataattgaccttgcataagtggtgaccatgcttccatttgaataccttgttctttacagaaagcttgtaattctttttgtgttaaacgagggtggtattctacttggttaatcattggtttaatttctgcatctttcattacatcttgtaagtgatgaatttggaaattacttaccccaattgcacgtacgcgtttttcgttataaagtgtttctaacgctctccacgtatctttatatttcccttctacaggccaatgaacaaggtataaatctaaataatccagctctaatttttttaagctttcttcatatgcagcaagtgtcgtttcatatccttgatccgaattccacacttttgaagtaatgaataaatcttcacgagaaatgcctgcttcttttatacccgcgcgaattccttcacctacagctttttcatttccgtaaattgcagctgtatcaatgctgcggtatcctgctttaatcgccgatttcactgcttctacaagttctggtccatcctctactttaaatacacctaaaccgaaccaaggcatttctacaccattatttaatactgttttactttgtaagtttttcattttattttctctccttttattttacttgatctcttttttctaatgtcatactccacgcagttaaaacaacagcacctactaccataattccacctacccaagccgtatgaattaatcctaacgagttcgttacaataccgcccaagtaagcaccaagagcaattcctgcgttaaatgctgcaatgttaatcgccgatgctacatcaacagcgctaggtacaaacctctcagctaatataacaacatacacttgtagccctggaacattcataaatgcgaatagtcccatgaaaataattgtgatgaatccagcgactttaaatggcgctgtaaatgttaaaacaaataatataatcgcttgaataaagaacatgtaaaataacgctcgaatcggattatgatttgataattttcccccgaccatattcccaatcgcaattgcaattccgtatactaacaaaataattgtaacggtacttgctttaaatcctgttacttcttgtaataacggagataaatacgtaaatgttacgaacgttcccccgtatcctaatgcagtaataataaatacaagtaacagtcttccattcgtaatcagcttaaattgatcgcgaaatgatacagacgtacttttttttaaattagaaggaattagcatactattggcgattaaagcaacgattccaatggccacaataacaataaacgaggccctccagccaaattgttgaccgataaatgttccaattggtacacctgtaatagtcgcaacagttaaaccagtaaacataaatgctattgcacttgcacgtttattctcaggtacaagcgcagccgcaattgtagatccaattgacataaaaataccatgcgcaaatgcagatacaaccctcgcaataagtaacacagtaaaacttgttgctaccgccgcaattccattaccaataatgaaaataatcataatccacattaataacgtctttcgcgacatactagctgttaatgacgttaatactggagcaccaaacgctactcctaatgcatataaagaaacagttaaccccgctgttgtaacagaaacatgtaaatcctctgagatagatggtaataagccgacactaataaattcagttgtaccaattccaaacgcactaattgctagtgctaataaagcaaacatacttctccgattcgtctgcataaccgaagaagatactgtatatgaattcaattgaactcctccttaatgcgagaaatccaatcataatagtatgataaaaaggcctttttatcttctacaaaaataactttactgttgatatacgctattatgaatggctttactctttttttgaagaacgcacttaaaagtacgataggtacctaaaagtaacataggcactttttagtaccgtactactcatttccctcttacgtatgctattatggaacatattcaacatgataaaaagtacgtactttaaagtgctataggcactttttagtaacatttaattatttagcttcttttgttggagaacttaaatctacattcatcaaaggagatttttatatgaagaaatataatattcccgttgaagcgactttagaggttatcggtggaaaatggaaggttgttatcctttgtcatctaacgaaaggcacaaaaagaacgagtgaactaaaacgtttaatgcctgggattacacaaaaaatgttaactcagcaattacgtgaattagaagacgatggggttattcaaagaaaggtatacaatcaagtaccaccaaaagtagaatattcacttacagaatacggttggtctttagagtccattcttgattctctttgtacttggggcgaatgccatcttgaaaaaagcggtaacacatcgatgctaattgtagaaggtgaataataggaaaaaggaaaaaacgaacatgaatttgttcattttttcctttttttctttatatgtatatacatttctaactggaacaaaatattttatacgctttcataccttgtcagcactacgttatacactcaatatcaaataattaggaatcatttttatgttaacataggtgtatatagtatataatataggatatatattatatacactttccggtaacggagcttttccattatgcggacaagccatgtatcggacagttcataaataataagtaagacgttatggttttagatttatgtttgcagcttacttgctgtcataaatttaaaggcattttattgtgttttgtgaaactttgtataaagtttcgtaaacgtttactatcttacttataaaaaataagagtattgctatcgtaaaggagaattggagatgccagaaactatgactcaaacaaagccagaacaagaaactgtacaaatttctgctagccaaggacaacttgatgtacttgatcagttgttaaaacctgaggtacaagaatcattaacaacactagtagaacagcttccaaaattaactgagcttgttaacattttaactaagtcttatgacttcgctcaaactgttgctactgatgaagtattaaaaagcgacactgttggtgcaattacagagcttgtagaacctgtaaaagatacagtgaaaagcatggctgcaactgcaatcgaagcgaaagatcgtgctgaagaaagcaacgaagttatcggcctattcggcctgttaaaattactaaaagatccacaagcacaaaaaatgttccgctttgtgaacgcatatcttcaaattagtgcagaacgtaacaataaataatttaacttataacaacaattagtaaagacgggggatatcatactatgtcaaaacaaattgtcatcttaggcgctggttatggcggtcttcttgccgctttaaacgtacgtaaatattacagcaaatcagaagcacaagttacagtgattaaccaatacccaacacaccaaatcatcactgaactacaccgccttgcagctggtaacgtgtctgagcaagcagttgcaatgccacttacaaagcttttcaaagggaaagacatcgatcttaaaatcgcaacagttgagtcattctcagttgatagcaaagaaatcaaactagctggtggcactactttatcttacgatgcacttgtagttgctttaggaagtaaaactgcttacttcggtattccaggactagaagaaaacagcatggtattaaaatcggctgctgatgcaaacaaaatctacaaacacgttgaagaccgtattcgtgaatacgcgaaaacgaaaaacgaagctgatgctacaatcgtaatcggtggtggcggattaactggcgttgagctagttggtgagcttgctgacattatgcctaaacttgcaaaaagccacggcgtaaatccaaaagaagtgaaacttcttcttgttgaagcaggtccaaaaatccttccagtattaccagaccacttaatcgaacgtgcaactactagcctagaagcacgcggtgttacattcttaactggtcttcctgtaacaaacgttgctggcaatgaaatcgacttaaaagacggtcaaaaacttgttgctaacacattcgtttggacaggcggcgtacaaggtaacccattaatcggtgaatcaggtcttgaagttaaccgtggacgtgcaacagttgatgcatacctacaatctacttctcacaaagacgtattcgttgctggagacagcgctgttgtcttcgctccagacggacgtccatacccaccaactgcacaaatcgcttggcaaatgggtgagttaattggatacaacttatacgcagcactagaaggcaaagcattggaagagttcgcacctgtaaactctggaacacttgctagtctaggacgtaaagatgcggttgctacaattggagcaagtaatactccacttaaaggcttaccagcatcattaatgaaagaagcaagtaacgttcgttacttatcacacattaaaggtctattcagcttagcttactaatctgaatataagcccgaatcatgccctgcatggttcgggctattttttatccgtaattttctctaacttatttattcgtcaaaaaaattatataccctttaaatttatctaaatatactgactttttataatgaaagctgtcccgttcggaacagttcttattgtcgctttttgtcggtaaatcgatatattgggaaaatcgctgatatattcggatttgcgctgatatatttcgaaaatcgccgatataatttgagttacggtcgatatattcgaaaaatcgccgatatattttccagccttacttattatcctaatttcacaagactgtagttcttcttccctttacgaataataataaatcttccatcaaatgaattttctacagtaacatctgtacccacatctgttactttctcaccattcatagaaatcgcaccattattaatgtcctcgcgtgcttgtcgtctagatggttcaatccctaaatcgactagccactctacgatgtttttcgtctcttttgaagactggaatgttggcatttctttaaagccttgttcaatttcatcagctgttaacgatttaatatctccgctaaataacgctgctgtaattttctcagcttgcaggaacgcctcttctccatgaacaaatttcgtcatttcttccgctaacactttttgcgcttcacgtttatgaggctctgtttctaccttcgttgctaattcatcaatacgctctttcgttaagaacgtaaagtatttcaagtatttaattacgtcacggtcatctgtatttacccagaactggtaaaattcaaacggtgtcgttttttcaggatcaagccaaaccgcaccacccgctgatttaccaaacttcgtaccgtccgattttaataataacggaatcgttaatccgaatactttcgcctcatgaccttctaacttacgaattaaatctaaaccactcgtaatatttccccattggtcactgccaccaatttgaagttgaacatcctctttcgtgtataaatggtggaagtccatcgcttgcaaaatttggtacgtgaattctgtgaaagaaatacctgtatctaaacggcttgctacaatatccttcgctaacatgctattgatgctaaagtttttcccgtaatcacgtaaaaactcaataatatttatttcatgtgtccaatcatagttatttaccatcttcacttcgctatttccaccaaaatcaaatagctttttcatttgtgctgttaacgcatctacattatgctgaaccacttctaacgtttgaagctgacgctctgattgtcgtccactcggatcaccaattgttcctgttgccccgccaattaaaataacaggatgatggccagctaattggaatctcttcatcatcataaacggaatcaaatgtccgatatgcatactatcaccagttggatcaactccgcagtatagtgaaatctttttctcttctactagcttacgtaagccttcttcgtcagtctgctgattaacggcgccgcgccattctaattcatcaataatattcatcttttgtcatcccctttattttttaaaaacaaaaaagcccctatgtctacgatagacatagggacgattattcaccgtgttaccacccagtttgcataaatagcatagctactcataccactcttagcaataatatcgattgctagtccgcttagcattacctaagatactccagagtgtaattcgcaagtttgtttgtgctaggttccagcaacccctagctctctcgttaacagtgacaaactgctactgggctctttcaacgtatgttacttgttaaattattagccattatattgaattgaaaacaaattgtcaacaatacccaaatgttattttaaaataattcatatcttcatacgtatttcgttattctttatcctctccaataatccttacttctcgctccaacttcacgccaaatttctcttcaactgtcttttgtacgaagtgaattaaatcgatgtaatcttgtgctgttccgttatcaacattcaccataaatccagcgtgttttaaagaaacttctactccaccaattcgcttaccttgtagtcctgagtcttgaattaacttaccagcaaagttatttggtgggcgcttaaatacgctaccacatgaaggatattctagaggctgttttgactcacgtttaaacgttaaatcatccattttggctttaatttcttcatgtacaccttcttcaagttcaaatctcgcttcaagaataatgtaatggttgttcgcaaatacactcttacgatatccaaattcaaatgcttctttcgtcaaagtacgtagctctccatcacctgtcattacgacagcttctgttaatacaaacgaaatttcaccgccgtatgcaccagcattcatatataatgctccgccaactgaacctggaataccacaagcaaactcaagacccgttaagttatggtctaaggcaatacgtgatacgtcaataattgctgcaccacactgtgctacaatcgtcgttcctgttacagtaacacctgtaatatgaattaaacttactgtaatcccgcgaattccaccatctttaataatgacattcgatccatttcctaaaaacgtaactggaatattatattcgttcgcatatttaataacttcttgaatttcatcataatttgtaggcgcaacaaaaacatctgcttttccgccaactttaatatgcgtatgattctttaacatttcatcttgtttaacatgtccttcaggcaataccgtacttaaatatttataaacctcttgcatattcattttacgattcctctatttctatattcattttatcccgttatacgggcccataatatccccacgtacatgaaaaaacctaaagtggtggatacagtgtacccaaaatcaattcgagacacctataaacctcttaatttataagaggtgccactcatattaaaatatatattgcataataaagcaacccaaatggactactaaacttgacatgtcatcagaaagacaacaatttgtaaaatatatgactttttcaaaacactatccctcagtatcttactataccacacaaaaagaaagtggtatttttttgtactttttactttatttacatcaataaaaaagagcacatcccacagaatgtgctctttctatactctttatattacttttcgttctcttctttttctttatcaaaccataacagctcatcgttatcaacttcaccattataattgattaaaatttcttctcctgcttttatatctttataagcatagaagttaaatgtatgattctcaaaaacgatgtcatacgttgcattcggtgtatatgaatgattaaataacataccatatcctaaaaggattgccgtatgattgattccatactcaaatgcgtaatcagcaagtaacgttttctcaatatgttcatgctgttcattcggataagagataactggtgctgcgtgtatcaactcaccctttttaatatcacgagttgcaaatacacctctattaaattctccatcactaagttcagaagtcttaacttcgatcatatgcgtcacctatataattctttctttgaagtattttattccgctatttgcggatagcttgattggtgagggctaataatcagtatgtactagtctcactttatctccttaagcttggcagaaaacgcgcagaaaagcaattaaattcctatcaagtattcgtttcaatgaaaaaagagcacatcactcgtgctctttctaagcaatattacttttctaaaatatcttctaacaacttcacttgctcgctaacagtttgtaacgtcttcactgacgtatcatttcgatgtttttcttcttccacactcgctagcacttcttctgtagctgtagaagtttgctgaattacgttagaagcatgcgtaacatcctttacaatattcgtcgttttaacttggaaactttcttgatgaacaacaacctctcgcattactttattaatcgcatcaataaacttccctaaatcagttacatttgttaaaacacttgctaacatctcgttacattcttcttgtactctttctgacttctctacttgcacttctaccttacttgcttgattactaaactccttcaaaatcccttgaattcttcccgcagaacgatttgattcttcagcaagctttaacacttcactcgctacaatagcaaaaccttttccatgctcgcctgccctcgcagcttcaatatttgcatttaaagctagcaaactcgtctgacttgaaatattcgttattacatctacaatttcattaatttgtttcgattgcatcattaaatctctaaatataattccagactgtgaaacaacatcatttaaacttctcatgttagtttcaaaatttcttagagtatgtacactaccttttgaaatttctaagctttcatccacatgagccgatgcagttcttacttgagagatgatttgctcaatatttccctccatatcattcaatacttctaccgaacgatacatcatctctgattgtgattgcgtaccaactgccacctcttcaaaggcaaaattaatttcactcatcgattccatcgacgtgttcatattttgtcttaaatgattgaaattactatctagtttcacaactgtttcttcaataagtctttgcgtctcttctaactcctgagcttttctcattacttcttgcttctcatcacttaaacgaaggagcagattagaaccgattttcgtgacgccccacatagcgattgttacaatcgctaacaaacttgcgaaattagcagcttcagatgaggctgtataagcaaaaaattgctccggccaatagctacaaaggataaatgtgatcacaacagctaccccgccaataattaaaatgaggcgctcgcttaaataaataagtgaaacagctaatgtaaaatagaccatttgaaatacagccgggctttcattaaaagcttgtaccataatgtaagacattgtaagcaacataaatgtcatgatatatttatacgctgattccatactttttataaaagtaaaaagcgttccaaatgcaacgacagaaataccacaaatccaaaatgctatggctctctctgtaaaaatatatccataatacccaattgcgattatcccaaggaagaaactacaaatcgttataaacagtaataaatgatttttctgtgattctttctcaaggttagaaaaacaagtcctctttaaccactccatatgaagccccaccttctacttatacatatcaattacttcagtttaaataccgcacttactgggttatgatcgctattttcaaactttaaatctttcccttgtacatttacaatctctacattcggtgaaacgataaagccatcaataatagtgacgaaattttcaccttctacatatttctttacatcatctcttacagtcataacagacggatctacagcccatttaaagccaccgtctgtaaagtccttcggtaactctactaaccactcaggacgctctttcacgaacttcggatcacttaattgagcgttcgaaaccaattgattccaatctccacccattattacgtaatcaccattttcataatgcttgttcatatattcttttaaatactctacttgctgttttctaattttcccgccttcatcataagcagacaaatgtaaatttacgagtctaacatgttttccattattaacaggaattttatattccacaattgctcgatctaaatcaaacaaacgctttggccaaggctccattccaggcagctggaacctcttcgcttcttgaacagtgtatttagaaaacgtacttaatccagcctccgcatatcccattggatttgttattggcactggaacccatttcgtatcgtagttcttgccaaatgacgaaacataatcaggtaatccttttttcaaaaattcatgttcatttacatcaaatgaacgaagtgactttatatcaacttcttgtaatagtgcaaaatcactattctcattttgtaaaaacgaaagcatattctttaaattagtttccgtttgctctttactacttgaaccagatccctttccaccatccataaagaaatcttgatccttatctaacccagcatatccaatattaaatgttgtaactttaaactcatttccagtcgctaatacgcgctccttattattctctaccttcaagcttataacatcagcaggctgttctttagtaagtgtcatataagctagaaatcctcctacaatgcccgctactactaaaacacatgtaaatacgatttttaaaaatttcttcaaataaatgactccttttcacgcaaatttatttttctttattttcagtcaaataaaacaaaacgacacacataagaaacattttatcataattaaaaccgtatatcactatatttagttgataagtaatcgatcccattttaattacttaaaaagccttcagacatcaaaaaaagaaaagttacaccctcctcctcactggaaattaaacggtatatttagtacactatatgtaataatcataggcgatggagttcgccataaacgctgcttagctaatgactcctaccagtatggatactggtaggagtctatttttttgagcaagctatttaaagaggtgagaaaattgatttatattatcgttggcattgctggtatattaggagctctttctcgttattatttaggtcttaatatcaacacattttggcatcattcatttccattggcaacattactcattaacttaatcggttgctttttcttagcgtggctaactacttatatcgctcggctaaacatcttaccttcagaggttatcacaggcatcggaactggattcatcggttcctttacgactttttcaacatttagtgtagaaactgtgcaattgatcaatcattctgagtggagcatagccttcttatatgtatcatgcagcatacttggtggcctcattatgtctggccttggctatacacttggagatttcttaattaagaaatctcttacagaaggtgattactcatgatagaagctttattagtcgcaacaggaggatttttcggtgcgattacacgatttgcaattagcaattggtttaagaaaagaaataaaacacaatttccaattgctacattccttattaatataacaggggcatttttacttgggtatataattggcaacggagtcactacaggctggcaactattattaggtactggatttatgggcgcattcactacattttctacgtttaaattagaatctgttcagcttctcaatcgtaaaaaactatacatcttccttttatatttaagtgctacttacataattggtatcgcctttgccttccttggaatgaagttaggcggaatataaaaaagcgactctattgagtcgctttctttcataagaaatatgtcccgccatatggaatggaaaataaaccagctggatgtacatcgtaatgtataatttgcatcggaagttgtgaatacggcatatactgaatttgcatcatttgtgcaaaatatgcttgttgctgcatttgaatagcttgattcacagcatgaattgtcccttgtgccccagccagcgtaatagcagctcctacttgtctaccattataaaaataatgattcatcatgattcatctcacttattctttttcttccatatggtatgtttctatttcatagtgagtgttttgtccctatctattgccctttttcagctttgaagtaataaatccaaatagcaatataccaataccactaaggaacaatatataacttatcggtactaggaaaaagaaaggttcttcaagaaatccatccgctcctactttactgtttgaagcatgtatcgttaaagaaataatcgctaaaatcatgaaagaaatagctactacgtatttatttttcatttcacattctcctctacttatgtaattccccttagattcttaccatcatattatctaaaaaagaattaacagtcaataattatttattgttaaacaataaataattattgactgaacaaacaacaaaaaggtttgcaaagcatcttaaatcacttcgcaaaccttctaaattataaatatttacacttcaaacctcttgcttaatacaatatacattgcgcaaaatagcacgaatatcccagcataaattaacaaaatctctacactaaacatatccgacaacggaccaaatattatcattcctaaaggaagcgcgcatgaattcgcaatttgtacaaggctaaacatccgtccgtgcattgatggttctactttctcctgcaataacacagtaactggtgtattgaagcacggcattgttataccaattaaaaaattaaagactaaatacataataaatatcggtgctattccgagtccaatcataagcagtccatataatgcacaagctagcgctgttgtatgcatacgattacgaaaaccaccccacgctgcaatcaatacgccaccagctgccgcacccgcactaaaggtcatctcactagcagtaagtctccacatttcggccccgaaagaacgagttaccattaaaggtgttaaaaaagcagctggacttattaaaatcatgacgataatcaataaaacgattagccttttaataaatacattttcttttaaataagtgaacccttctttaattccttgtagattagatttttgcttactttctacattcacatgtccttccacatgaatgacaaacataatactaattccaatcatagctgtaataacatcaataaaaaatgttgtttcaatgctggcaatagaaagaatcgcagcacttgctgctggagaaagaaacataattaaagatgtaatactgctatttattccatttactttcataagatactctttcggaacgatttgcggaattaatgcattcacagctggcgtttgtactcctgttccagctgaacgaatgagtaacacaataaaaagtaaccaaatacttttatatcctgttaaaaataaaattgctaagactaacgtcgcaatcgctataattccatccgataacataatcatctttttacggtcataacgatcaatccaaacacctgcaaacaaagatatcgcaatttgtggtagaaaaccgcaaacagttgaaatagtcaacatcactcctgatgatgttgtaagggtgatataccatataatcgcgtattgcacgagagaggaaccgaacaacgaaatagtttgagcggtcaaaaataatataattttcgttttccaattgttttcactcatatgtttcacacccccttaactaatcccgtctctatatgaaagatgctatctgcccaatcaagataaaaacttgcttcgtgagatacgagtataatgctgcccttaaacttaattaacgccttttgcaaagcttccttcgcttctgcatccaaatgatttgtcggctcatctaaaattaagaagttacaaggtgatagtaataatccacacagtttcaccttcgattgttcaccaccacttaacgtacgaatttcttgcgaaacgtgcgtatccttcactccacacgcagctaaatgatggcgtatttccttcatattcagtttaggaaactgttctgaaataatttgaagcggcgttaaagaatcattgctccaatttaaatcttgctcataatatccaatctttatttgctctgaaaagtgaaactctccagaaatactagcaatatttccaacgattgtttttaataaagtagatttccctactccattgaaacctgtaatgacaagtttttgcccacccattactgaaaaattcaactttggtaagagagcgaagtcgtaaccaacttcaagattatttacttcaagaactgtctgaactgaaatgggaagttcctgaaaatgaatagacggtttatgagtaaaacttggtggcgcaattctttccatacgctgtaattgttttctacgaccttgcgctatttttgaattcaccccagcaatatttctacgaatatactcttccgttttttcaattttcttttgctgtgcataatattggcgaatataatcttttcgcaaatgctccttttgtcttacaaaatctgagtatttgccgtaatacttcttaactgttccgaactctacatcacatatgcaagaagttaccttttccagaaaatcaaaatcatgtgatacgacaataaacgctccttcaaaattcattaaataattagcaagccactccacatgctccttatcgagaaaattcgtcggttcatctagcaataaaatattaggctcttctaataagagcttcgctaaaattacctttgcacgctgccctccgcttaattcaccaatcacacgattcatcccaatcacatcaatacctaaaccggctgccaccttattcgtaatactatctactgaataaaaatcacgagcctcgagcagtccttgaatttctgccgctttcaatagttgattttcatctccagtcatcgcactttcttcatataacttgttcattctcttttccattgcatacaaatcataaaaggctctctttaaatattgtgaaatggtataaacctcatcaatttctgcgtattgatcaagatgtccaatttgaatattaggttgccactttatgtctcccttatcaggaataatttcccccaccaatattttcattaatgtgctttttcctgcaccattctgtccaacaattcccatatgctcccctttatgcaaatcaaaagaagcattttcgtataatactttatctataaaactatgtgataaactttccactttaagtaaactcatttttattcctcttttcctgaaattaaaaaaagcagagagatagcgtcattcgacactagccctctgcttcgtggtttttcctatactactccaatttatagtaaagactcatcggaataatatacacaaagggccatagacaaagcattgtctatggccccttaatctattttatacaccagctgaaaaaccataacgaaataagcatagatacactatacttttttagaaaagttattcagccgatgaatataggggatttataccccttgattaagctccgtacaacgcttcaccgtatacatttgtgcggagcaaagttttctaatgagttttacaaattttatataaagcatattatgcaccttccttaatacttaaaaaggattttagcatacggttttacgaagcgtcaacattacttccgaatctttcaactacttgttttcaaaatattgcttctgaaacatacacattcttatcgcattatgatagttaccatcaacgaaaaactcatcgataagctcaccttctaccataaacccaacttttttataaacatgtactgccttttcattttccttatccacaactaaataaatcttatgcatatttagtacggaaaaagcgtaatccattgctaaacgcgtcgcatccactgcataaccatatccttgataattcggatcaataataatttggaattctgttctacggtgaatataatcgatttctactaactcaactaatccaaccatttcattgtctttctcaacgataaatcggcgttcgctttgatcatgtatatgtttatcatataagtcttgcagctccacaaatgcctcatacggctcttcaaaccaatacgacataatatgcgcattattattcagttcgtgtacaaactttaaatcttctcgttctaatggacgtaacttcaattcctgattcattcctataacctccaagtaaaagaaacctcttcacttaatttctcaatttttttcgatttcaaacgccctaatttcattgtaaactttcaagcaacttgaaggtcaagatgtaaaaaagtagtgctgacttatgtctgcactactactcttttctcaaatctctcatatttgatatgtataaagcaataactaaaacaagaattgctcctgcgtataataacgtctccatcggttcctcatgagacacaataattaatcgaattaaggccgtaattccgatataaataaaataacgtaacgggaaatgatagttcgatttaaaatacttaataattaatgcaatgaactcgaagtataagaaatagacgatgatactttcaaccaatttataagacgtatactcttttgccgaaaaaatatactgcacgaacgtaattgtctcattcactaagaaaattgataacacaatggataatataattaaggctatatttaatatccattgcaaaacactagctataacatgatcgatattaaatgacttcatactctctttagactccccttcgtataagtacttatttattatagcaaaattacgattggaaagaagttaaatcatatattcgtcctttgttattgccagtgaaggtgatgttcattgtttggaggagtcttttaaccgcagaactagattccatattaagaaattccctcaattcgctattagtagttatcacactaaacagaagtgtgtaatcttgtacagcacgtaaatgagcatgtttagacatactattgcaatttgaacaacgccatccctgtctttcttttaacattgccattgtaaaacattcctcacactgtacaccctttagcaattcctcttttttaattttatattgcgcaagaacattttgacgttgcggaatgtgctcattcataatctggcctataagtccatttatattatcaatcactttttctttatattgatttttaatctgttttattctattaggtaaatttgcactgtggataattttactagacagtatttcatctgaagttttaataattgtacgaggggaactaattacaacgagggcttcaatcggaatattatgtaaatcatgtagattcagccattttctcagttgcatctcttgccgtttcagttgtaaaagcggatctgggaatccttcttccgtattaccatctactattcgaataagttgattgaactttgtatcaaaaattaatgtaccaataatattttttatttcaaaaaaaagaagaaaataagatgaaactatgagggtatcaatttggaaataatgtttttgatcaaataacctaatatcatgtaaaatatggtattctgcttcggatagaaaactcagcggatactcaatcgcctgctctcctttatagccggccataaatttcgctagactttcaaccaccacattcctttttggatgatgagcaggcaatcttctaagtaaagcttctaattgcagcaaatatacgggcattttccgctctttcacaatcatttttatccccctccaaaatatatcagcgatttttcaaatatatcagcacaactccaaatatatcggcgattttcgaaatatatcggcgcaactccaaatatatcagcgattttcgaaatatatcaacttaccgacaaaaaccgacacaacatacacacataaaatcttatacacagtataacatcacatctaaaatcgcaatgtaagcataatgtgtataccccaatgtgattacgccattttcaaaataagaaatttacattccccccatgtaaaagacctttttataagtatgaaaaaaatttaggaattagtttatctttttttaatgttttatttagaggcagtttatagtcggggattaacataagaaacgtagcaattaagtttatatatgacgcactgctactataatcgctaaccgtactacttgaaatcataaaataaggagacgataaaacatgaacaaaaaaacaaaagcactatcatccgtactgctcggattcacattagcattaacagggtgtgctggtactaaagctgaagaaaatcatgggaaacaaaagcaagaacaagttgctaaagaaacaaaaaaggaaaataaattaactaaagggcaaaaaatggctaatattcttagcgagacaaattggcaaggtacacgagtgtatgacaaagataagaatgacttaacaaaagagaatgcaaacttcattggtcttgcaaaatatgatgcgaagtccggcagatatgaattttttgatgctaaaacaggtgcaagtcgtggcgataaaggaactttctttatcacaaatgatgggaaaaagagaatattaatttcagaatcaatgaagtatcaagctgtcgttgacatgacaaaactaaataaaaatgtatttacttataaacgaatagggaaagacgctaacggtaaagatgtagaagttttcgttgaacatgttccatataaagaaaaagaactttctttcactgatccggacaagcagctgaacacgactacaggagatattgttaaaaacgttgatggagataaaattttaggcggtaccctttggcacggaacaaaggtattagacgaaactggtaacgatgtaacacagtttaattcgaattttataagtctagcaaaatttgatgacaaatctaataaatatgagttcttcaatagcgaaacaggtcaaagccgcggtgattatggctacttcgatgttgtacacgaaaataaaataagagcccatgtttcaattggaaataacaaatacggtgctgctcttgaacttactgaactaaataagaataaatttacgtataagagaactggtaaagaccaagctggtaaggatataactatattcgttgaacatgaaccttataaaggtgatatgaaaccacaatttagcttttaaaaacgtttgattaaagatcctgtactgagttacaggatctttcttattaagcaagagaacaaaaagacgaaaaacatgtagcttttcgtctgcacaatattcccaccttatagttgatgatttacaaaacttaaaaacataccgatacaaaataaaatttgtgaccaagtaaaaagcgccctacttatagggcgcttgttttatacttaatgactaatactagctgttgggtataatgttgttcctccaattgaaacttttatttcatttgttaatggaacattttgttcattaataattgttctccaccattcccatgcaagacctgtacattctcttgctacaatttttatattttttgaatttggtgggagtgggataactgtagagtaatgagccgttttgtcttttccgctaccatcccacgttttatgtgttagtacttcgttacccttttggtcaaatgtgaattcatcccaagatacatcaaattgagcaacgtaagcaccgtaatgatcaagtgtcattttagcacttgaatattctgtagttgtcgtctcaatataatctgtattgttatgaacagcagcagttgaattatcttttaagaaagtgcttgtatatgaaattgggtatgctggatttttaagacttaattcagcattatctttaatgatatttcggatttcattgaaatctttagtaacaaccttgttatgctctttcgcatctccgcctaatactacagcagtaaaggtactttcttcaaaaatatctttatactgtccacttgtttcaacgctgttattcttaagtaaggctttaaaagcagcttgtacatctttgctcttagatgttgtttctaattttacataaatcgttctaccataagctacatttgaaaccataacaggtggagccgaattacttacgccttttcgagttaactcgtcaaaagtaacgctattatcaaaaaggtcggatggattgttaggtagttcagcacttaccgtataaaatatttgcttatacgccgctaccatcacttttttctctccatttgcaaccgcattaaaatcaatgtttagactgttatcaagatatttagcgttaacattaagagcacttgctatttgtgatttactataaaccatagattccgtatactgcattcttgcaggtaacgtatgtgttgtagaatacttttcattccaagtagatactaaatcgtctactgctccagctacattaccatatgtcggattttggacagtgattgtattttcttttctcatgcccggtaagtctatactaatattcaaaggctttctcttagccactaataaacttggttgattgtctgcaaaagctttatttgcaagttgtacagctcctggatacgtgcgattcactacagaatcaataattgaaatatcgactggtgacgttgtaagtgattttttctcgcgttccactactacaaatttaccatttgaattgatactttctttcggaacaaaactttctactttatcaccatttacagctaaaacctcttgattattatatttaagatttgctataccagtatcaatgccactagcatttttggttacatcagttgcattacttgcttgtgtttctgcgaaggaaatagatgaataattaatagtgcataaactaactaataaacatgcaaggaactttcttcttttagtgtttttcttaatattcagaaaaatcaccccgttcttttttagtaaaatatgataatgatcgataaatgatagctaactaataaacttacataaatgcttttaaaagttcttgaattaacgggattacgccacctacaaattttaaaactgtcattgcgatttccatattatttcctcctttttattgctacgaaaatgtgatttatctttatgccctcattatagtgaccccttacacttttatcaatacactctgatatgcaatattacatatcaaaaaacaagctgaattcttttaaaaagttatacagggatatttttttcgtttagtacatacttgaaaaggtgaagcattcttttgcattttatgagtagtcacataaaaaagctgctgcctataaaatacagacagcaacttcaactagagtagcttgcataatctacacaagctacggtattttttcacattttataactaataaactgcgattggcccataaggaccattaataatttctatttttgtttcaaaaatatctgtcaaaagtgttgagtccataacctcttctactgttccaaaagcagcaatttgtccatctttcatagcacaaattttatccgagtatttagctgcaaaatttatgtcatgcataacagtcaaaattgttcttccaaattcattagctgcacgtcttaaatgctccatcatttgaacagaacgagcaacatcaaggttgttcagaggttcgtccaaaagtacatattccgtctcttggcacaataccatcgctacatatgccctttgtctttgaccaccagaaagctcatctaaatatctattctctaaactagttaaatctaagaaatcgatatatttagaaatgataacctcatcttctttagtcaatcttccctttgaataaggaaagcgcccaaatccaactaattgtctaactgtaagcctagttacaaaatgattttcttgtcgcaatatagtcaaaacttttgctaagtcttttgatttggattcagaaacatccatatttgctacctgaatttggccttcatccatatctaaaagtctaccaatcatcaaaagtgtcgtggactttccagcaccatttggcccaattaaagaagtaaagcccgcttttggtatttcaatatccaaaggtcctatttttaccttatcagtatagaactttttaacattatcaatttttatcataaagccctcttccttaaaactatagttaagaatataattccaccaaataattcaataataactgaaactacaccttgagcatggaatacatgatacattaaaaagtatgcgctcgtcattattaaaaatcctatagcaaaagccattgggaaaatatatctatgatcataagttgacgccgcctgataactcaaagttgctactaaaaagccgtagaaagtaagtggcccaattagagcggttgaaatggacatcagaatagcaactaatacaagtgtataaattacactaggttgatatttaactccaaaagaagtagcaacatcctttcctagtgacaaaacattcaaattcttagaatgagcaaaaattaatactgctacaattatgatcatcggaattacaataggaaaatatgcaggatctgcatgattaacagaaccaaataatcttgcttgtaaaatatcaaattctgaaggcgcaagtagttttctcatgaaagttgacacagaatttagcccggtaccaataataattccaactaaaagcataagttgtaaattcccgtatttaccggaaagtaaccatccataaagtatcaaactcatgaagaccataacaacaacttggaataaaaatgatccaattccattaaaatttattaacgcactagcaccaaagaagaatactgtactcgtttgaattgctgaataaagtgattcgaaacctaaaagtgaaggagtaataattttattattcgtaatagattggaaagcaactgtcgacaagctatggcaaaccgcagcaataatcattgcaacaatagctactatccttctcttaacgactgggataaaagaaggtgaatctatcggaactggattgttataaactaaaagtccatatgaagaaagaagacctaaagcaatcaatgttatgagtaaaatccaataacgtcttgcttccttcttagaccgaaaagcgctagctgatctactttcattatgaaggctagaatcgatttcgacattttctttttttctatattctaatgtgatcatcgtagcctccttggttttctttgtctcaataaaatagtaataaacacgactgctcccactgttgcaagtattaaagaaacaggtaattcaaaaggctgtataattgttcgagaaatgatgtcacaggcagttattgatcccattccgatcacacaaacccaaggtaaattactcctaagatcatcacctctaaacattgaaacgatatttggcacaattaatcctaagaaaggtaagtgtccaataacagctgcaacaattccaactgcaacagagataagagcagtcccaaaaagaacaattctattgtaattaactccaagacttgttgcgacatcttctcctagtccagctaaagtcaatctattagcatacataaaaataagaaaagtaatgataacaatcagccataaatattcatatcttcccacctgaatgttagcaaatgaacctacaaaccaagtttcaatactttgcgtcttttgaaaaaggagtcctaaaaaagtggacactgcagaaattactgctccaagcatcaatccgataatcggaacaattaaagacgaacgaagcttaactcttcttaaaaatagaaagaaaatcatagttcctataaaagaaaaaatgattgcaccagtcattctttgaactaaagttggggcaggaaataataaatacacaaaaagcaggcctaagcctgaccattcaatcgtccccgttgtagtaggttcaacaaaacgattctgtgtaattaattgcattacgagtcctgccatcgccattgcagctccagtaagcattaatgcaactgttctcggaacacgagtgatgaaaaacatctccattccgtcctcttgtccacgtatatcataaactccagtaaacagtgatataatccctaaaattataacaactataaccgctattataaaaggttttgtccatattttattgtgattataaaactggggttgagaaatattctcaaccctagaaatcatattttttgacactgtttcgtacccctttacactacttagctaaagtttttgcaagatttccaaataactctatataagtttgaattgattcatttgtgtaagtatcttctggtgcataaacaacttgttgtttagaaacagcagttgtgttttgaagagctggtgatttagaaataacatccttagcaggtgttgacttagctgcatcagatgttgcagcatcacgatctaatacgaaaagccaatcaggatttgtttgtgcgatagcttcaacagaaacatcatcacctttatgacctgcagtagaattcgaaacttctaatgctggagtccaaccgaaaatttcatacataggtccccaaacgcgaccagagtgcggcgcagcaaagccaatatttccaccagtaacgataacactcataactttatcttttccgttataagcagattttgccttttcaatagatttatcgaaatcagctactaattgtttagcttctttatctttagcaaagattttacctaaagtagttgtagaatctttaagtccttttactaagttttctccaggcttagtagccttctcagaaacatcaaaattaagatcaataacagctgcatttggcactaattttttgatttcttcataatgatcagcaaatctttgaccaacgattacaagatcagggtttgccgctgcaataatttctagatttggttcacggtgattcccaatattttgaactttttcatcctttttatatgctgaatcagcaggcatgatatcctttggagcagccgctaatttaattccccaatcagataaagtttcaaaagttctgttatccaaagcaactacattctttgggtttacaggtactttaacagttccatgagcatcagtgatttcaaccgtttttggcttatcactaccattatctttattattagccttcgaagtttctttacttgaatctgagcaagccactaacattaaagtaaaaattgctagaatactcactaattttaaaagcatagattttttcatatgtatactccttatagtgtgatttatttcgaaaatgatgacatccatagattgaattagaaagtaacttttattcaattgaatcgctattgataatcattttcatttgaacatcctgttaattagtatagtcattaattctgtgaaaatcttgtgaatcgtatcaattcataaaatcaagcataaaaagtaatatgtgcggtcaggactgttgattagccttcattaaatactttctcaacgaatacgggacagagaccttcccttacaaaatacgcgcagtaataactaatatttcacagaaactactttattatcttatttttatcattcaaccattgaatagcctctgccatgtatcgtttgaatatatctatctttcttctcgcactttagcttttttcttacatacccaatatataagtctactacattcggatttactactacgtcatatccccaaacttgattcaaaagcatttcacggcttaatatcgtatttttattcttaattaaaaatacaagtaaatcgtactcgcgcttcgtaagcgagagatttttgccaccttttttcacaatattgctagatgcatcaacaaagagatctttaaactgaaaaaagtttgtctcattttgctggttatagtcacttcttcttaaaatagcttgaactctcgctactaattcttccttcacaaatggttttctaatataatcatctgctcctgcttgtaaccctgctatgcaatcctcgctagaaatattgttggtcacaataatgattggtgtcgttttaacaagtcgtatttgtctacaaatttctggtcccgatatacttaatgaatcccaatccaatatgataatatcccaatcttgctcatatgctatatttaaaccttggttttcattgtgaagttttaaaatgaaatggccctcttgcgttaaaccgcttacgattttctttgctgaagaccgttcatttttaatcaccaacacctgcttcaccgatggttcacctctacttcaatataaattatttagataaaaaattatcccgaaaaaacaatttaagatttataaatttaaaacccctaaataatccattaaaacagtttattaggagaactctatataatcttacaataggtatggataaaaacacaaaacatatggagattcaaataaaatgaagtattaattaatcaaacagagatgttcatccccactaattatcagtcctcaccaatcgggctttgacgggataaaattgtgatcattaagggataacacacaagatacattgaggatgtaagtgaaagaaccaaagaattagatacattctatttttagaactataacctttccagaaacaaaaaagaaccataacctcgccaacctggcaaagttatggttcatatcatacaatgtcattttacctataagttggccgcagttggaagcataagttggccagaaaacacttatttttgtagataatcatctaattattcaaccgaatcggaagcataaattgaccgtgtgttaattattaacccataagcttgccgtgtgttttattaatgtagctttggaataatgtttggccaaattgatactaataaccttaataaacgagcaaatggaagtgacgctttcgttagttaataggtcactttgctctcttgatatgctttctttacccgttcaatttgagcgaggtgtccttgtatatattgaagatctttcaagggctagaaggggcacctgtgctgggaagtgcaaagtagattccagtaaaaggataaaaagtgtacggtgcactttttaaaaaggttttttgtaatcattttgcagcacgttaaggtattcatagtgctgcaaatatctattttctatttcgctacaaatatcaccgtattatcgaaaattaatttgcaacacaatatatgcaacgttatggcgccataaaaatcaagcccaagtggagtgttgcataaatgttaatttttgcaactgtcgatgcatcacgtattacattttctgtaaattactttacacttcacggcacggttcctaacgcttcccctagggggagcgttaggaaaatgcggatttacaacgttaagcccatttttaaaacgattccctaatacaaaatatttctcaatacttattttatttaatccttcatatatttgagttgaatcattgttataaaaaattaatataaatttattaagaaaagaggaattaatatgccggaacaattaattgcaactgttttatcacaaacgtctcctttagaaggacaaagcaatcgttcaagtggaaattttagtacggaatctcttccagttggaacacaatatttaaaatgggtaataactgatggaggaaacccagatattattagttttaatgttatgaaggatgtatctagtggtacggatcctatcattttttccgctgtattgaatggtaatagaacaactgtagaatcagcgagatcactttatatcgctaatcctagaaacgctgcagacccattcaatgtaagtgtatatgcaatttattagaatatcgaaaaaaacgagggggctgtctggacagcctccttgtttttttaaaattttgaccactaataggggtcaccttacatgcccatcaacttaaggatagaaactctacggttttccattaattgaaatgaacaaacttttaaacagtataatctttctagctagctttttagaaagaataacgttttttgacacttgggggtagtgcaaattcttaagttgatgggcatgtggcggtaccccttctagaatcattcgaaataactctcccattttttcgtttccatttttagttctaaattcctggtttaatgtaaaagctccctgctgaatatagaatatatatttttgattatttttatctgttagtagttgctgcaattttatatatagttcttcatcaaatacatcgtatttaaagactagatatccttgttcctgtttttgtttatttgtatactcatatgagttatttacgttattatcaaatacaattaagctctttttttgttccaatagtaaacttgggataaaatattctcttcttacaccaaatttactaggactgactatgaaagtattattattcattcctttgccccctattacttagttactatatgcttccccttatggacttcaaagtaataagattccaaattgaacatattgaatccagattctttagataaatattgtattgcttcatcccatgaaactgcttcaaaatctgtagctgaaataatgggattccatactttgcataatctaaactggtatctatcaatatcatctttgtttataataattgaatcatttattactagtttttctttatctaactttgcctggtgaagagaagtgttattttccaatttttcagcttcttcttttgtttgataatttgtatctatgactatttcaacttctaggttaccaatatggtatcctatcgaagtacaataactagatctcaacatttttcaaactccctttatctagcaatatgaaaatataaactggtatcctatttctcaaaaatacatgttaaccgcttttgtgctacgctatatgataatcgggcatcaaattctttacctgttttattagatttgagaccttttatcatatctgttaagttcttttctaataatttttttatatggttatttgtaatatttttacctagatatgttccgttaatcttaaaatcacatgttttattatagtgttcacatttataatttgttgttcctacaagtaccctgcttctacaaagtggacatttacctaatgtacgatcatctattgtaggaaatataaatgttggcttaccatcctttaattgtagtgcagccgtatattctcccttttcagattgaaatccattgataaaatctgttttttgcccactaaacaatttttttatttgtgctttaggaatgagttttccctttaatttaataggaaaggaataatcacaaccatttttataatcactgcatccataaaatttttcttttgaaagaattttacccttctgacattttggacatctgcctaatgataattcatctattgtagggagtgctaatcgcacccttccttcatgaaaggctagatatgcatcaaatttccccttctctgattcaaaccctttaattaaatctgtttttttatctttaaaaagtttttttatttgttcttctggaatattctttccctttatctttttaggaatagacatttcacaatttggataagtactacatccatagaattttcctttgttaatgatttttccctttttacatgtacaagtgcatatttctatttgtttattatgggtatttaccattctaattgccacattactatctatattccctaactgttcaactaccttttctacaaacgaatttgtttgcaagacaaattcgttatagtccatttctttattttcaatggatgtaatcataccttctaattccgctgtatactcagggttttttacctgttctactgggaaagtgtctacaaatgctcttccaatctcagtcgtactaatttttccattttcaatagcaatatatcctctattttctaaggttgggatgaatttagcttctgttgctacagtcccaatacgttttcctttcattaattctttcaagttttgatcctctaatttctttccggctgactccataaaagttaacattgtactttccgtatgtaatgctggttttttagatttagatgttattaattcatgattaacaattaataaacgatcattttcacttagcattgggattttaaattcttttacgtcgtcgtcttcttcatcctcttggaatacacttaaaaaccctttttcctgtaaaagtctttcctttgatacatattcattaccttcttgatcaacaaaggatgcttcacgcacaagatatatagcaggcggcataaaattgctaataaatcgttttacaataagttcgtatagtttttgctctagttcatttttatttgcaccatcatattttttagtcgtaggaataacagcataatgactattaactaattcatcattaaatgatgaatgtttctcagaaaccgttgaaatatcaatcatgtttgcaaattctttatagttagattcttctagaacagtgattatttcttttactttattaacttgttcccttggtaaatgtcttgatgatgatctaggataagaaataaatccttcctcatatagatgttgaatatgtttattagcgacttcaggactgatctttagttttgctaaagcatccttgtaaatatccgttaaattatatagtgatttagattgtttttttctttccttttcactaaattcttttacgactaactgtgtatctttaattctagttgctaattgtattaatggagctgagtctaaaatttgttcttcagttttcattacagctgtgcatcctggagctgttaagacttttaaattataagaagtttgttccttataattttgtctagctatttcacgttggcgtatttcattaagtaagcacatttgtactcgtccagaacttaataaaaattgattattagctagtttagttgtacatcccctggttatattgattccaagggcataatctaaatactgccttgcatttgctgccgatgctaacgcatcaaactcttctcctggtaacaagttatttagcgctgcctctagttctgctggctcatatgatgctgtgaatatccttttttcatttttatctacgcctgcatagctataaacttcacgatagattaattctccttccttgtccttatcacatgagttaaccactaaatcaacatcttctctatttaatagttctactaagatattcagttgttcttcagtttcttctataactttaagatgtggttctagaagaattggcaaatgttcaaaatcaaattctttatacttactatcaatttcttctggatattttaatcttaataaatggccctggcaccaacttacaatatagtcctcattttcaaaataaccatagtaaggcattgtgccatttaccttttttaaatttttgaaacgtggagattttaatagtttctgtgctactttatatttttctgcaataaataatgtttttcccatcaatttacctcctaaaaattacttataatccattactggatgttcatataaactaataaaccaataatcaaccaaaatggagcaactagttttaaaccattgaaacatcctctaaaaaaagcaccgtcatacattataaatttctctcacttgtaaaatatctctcaattaaattactccttttcaaaaaaataaatttagatttagatattctaagctatttgcaaaatagagttctttaaagaactacgttaggtatattataccatataaaaattaattaattaggtatttttatctataaaattaggtgttaataaattattcatgttcatcttcacttatatttataattagcttgtataaaatacaactcaaatatcctaccgatgcaataagtataaaactgtctacaagaaaattaccggtcatttttccaccttcatttcttcccccgtgataatttaaaggtttcttgcttttaatttattttacttaaaaggttgtagtactgaaatatttccaagtactacaaccttttaagtagagaaactattttgtatactttccagaggctaacttttctacagcttcttgtttttcttgctggccagctgtaacataaattttggttgtatttatatccgtatgtcccatcaattcagctacatatgaaattggaatacctttttgtactaaatcatggccaaaagtatgtctaagtacatgcggtgttagttcctccaatcccgtatgcttacgaattgtcttaaagatattttctattcctacaactgatagtggaccatttttttgagagacaaaaagatattctgtttgattttctttaaaagcttgatgtatttgtctatgttctttccatttattaatgctattgactacatctgaattcataggaatctttctggcttttccaccttttccatcccgtacagaaataaaaccatcttcaatatcgtctagttttaatttggatacctcactgactcttaatccagcctgtaacattatattaactattgccaaattcctatagtttttccaaggatttttcttaattaattcaacatcctctaggtacctcataagcctatttttagaaatacgatcaagccatttagcatcatttttattttgaattttaggttgttttaccattgcacctagatttgtctgcgttctattcgtttcatataaaaatttaaaatatggttttactcgaccaatttttgtagaaactgtagaaactgataattgttttccactatttgtttttgcaacttccattagaaattgtttccactcttgaagatccataggtgtaatcgactctccctggaatacaaccccatttgtatcttcataccactgaataaactcttttaatgtagtttcatattgcttaattgtattctctctttttccttgttctttcaaccaaattatataattttccataaaacaatcacctaacattacctttccctaaaggtatcaccttcatttattctctatttataatctgctaataactacatgaatactcttttatatgtagttaaataatgaattcgtttaattctccaacacttatcttaccgtttgttaagtatttctaaacaacctgctaaaaaagcctttccttttttgctcactagctgctattaatttttttgtttcttgcatttctcttatattttgtaagagtaaattatctcgttcttctgcccttttttcccgttcgttcatccgttcttcaaagtatttatgctgttcttcaagtttttttaaaagtgctttattaaaatcttcttgctgtttttgttgttctaatatctgttctagcttttgaacttctatatttatggtctgtagatagtttccagggcgttcctcttcaggaacgcccattgttctttcttcaggattcatacctgctactaatatttgtgctgctacttctaaatttatacttttttcttgtacaagttctttcattcgtttcaaaacaataatatctttatcaacaaaagccctactattatttcggccacgaataaatatatatttttgattttctagagcaatacaccactttctcagtgtactatccccaatttgtaatagctcagagatctctttactccaatatccctgttcgctcatgtgttcttctcccttctcttactgttcttattatacatgttctctaaggaacatgtttttccttttagtaagaaaaagtgaagaatttcattttaatcctctctactttaaaaaccttatttacaataatgtaaaaaatatgttgcagccacatgattttcaataggaacttgttctgttccttccatattatacttatattcattgcctttcacatcaaaaattttatagcttcttttcccctctttgattccttcaatagtaataaaaatatgctttttaaaggcataaatgagaagattattattctcttctgcttctatacttatcattcctattttgtttacatccgtatcctctaaaaattgttctaaaaaagaaagcagcttagttatatactttctatttttctctttagtcattttaaatataagtgaatccccttcaaaattcacataatcatccatcgttccaaagtcgccaagcttctttgctatagcagtcgtgtccttatgtgataattttctatttaaatgcatgttaatttctaccgtcatatacatatttattttccctctcttgataaacgttgattatcttcagcaatttttatacaaaaacttaatcgtttgtgccatgtttcaaatttaatacaaggtacatactggctgatttctcttagtacattaattagttcttcactcgaaatctcttcgcaactctttgatacaatataatccttgctactattttgagtatctattatgctggcaattttctcttttatattgtgaacattatctaattcattatccaaacaatttaaggattcataaattaattcatgtagatatttttgaagaattctttctctaagctctgttagttgttcagattgaaatcttattttttcatgctctggatgatataatgtgagatactctgaaaacatctctttagatgtagaatacattatccctaaatcataatttataatagctggtatagattcattacgattagataaaggaattaagacatctaagtctttaagcgttttctcccattcccctaaatcttctttcgaaatttcacccacataaaatttttcacacttacttttcgatatatcgctgcctttatataatctccttagatagaaccaattgctaatataattacttattttttttagaaagaaacatatcaacattcctatgccgatccaaattaagattttatttagactaaaatagtctaattgcatatagatttatcccctttccaaacttttattttggtttctaatcaatgttttttcagggttcttttgtattggtgttatcactgacttaataagattttcgagttcttttgtgtttacatgagatttaatcatcgcatccatcatttctctttttgaaaccctattccattcaattttataatcagcatttttggccaatgttctagtgaattcacgttggctcctaccatttccttctcggaaaggatgtagtacatttatttctgctagataatgggctgctctttcagaaaacttttccggactcataaccttcaagtaattttcttgttttagttgaccaaatagttcttttgcccctgattcaatgaatctagcatcaccaaaagagaagaaatcttttgctatattttcttgtcgtatttggccagcaaattcataaatgtcttcgaaaatatgtttatgtatctttttaagatgatcaagatcaaaattaccctggattggcttaatttctaattctgcgattttggccgtagttatcaatttttctaattcttctaattccgcttgatccttaataccaaatttattttttaaaacatctgtgccatcgtatgtgtaaagagatttatttaccatgttttctagcacgctccctcgcaattttaataaatgtttcttttgtgatttctttttttagataagcggtaattagtttttcatcagaatctgtaaatctaaagccttcaatctccatagatccttttgcattttcataagcttgcttaatacgtttgttatataattcactcatattattattcctttctgatttgaaaatcattttttgatataaccctttataattcctctggttttaataaaatcttcactttatttttaagagcaatttccaagccgaaattactatagttttcttcaagaaagtgttgaaaagtgtcatatacactccttttccatatagtgttgccaatcatcggtttaattttgtcatcgagcttcgttaaaacatccattagattatttccattagcaacagggagccaagaaccttcattctggaaataaaaccctaattccgtacttagcatcccttcaccatctataatctctcttattttatacatatggtttggatgaggtgtaactatagcccatatccccctactatatctatcatcccaacatagtaaattccaatcattctttgttattaattctggtatcgcatccattttatagcctcctattgtagaaaaaattataaacaattcaaattttattgagctgttagtaatccgccttctggatttaataaaggttctattacaactccaccatcaaatcctgcatttcgagctacttttaaatattgaacttttgtttcttcatcagtgataataaaagtataatcatctatttcttttgtggaaaaacgattgtctttcacttcgttacctacatatggtttaccatttgcttgatacaaaggtacaatatctaatccaccatcaaatccttcatttcgagctacttttaaatattgaacttttgtttgtttatcaattaagacaagtgtataactatcaagctctattgccttgaatcttgaatttgaataatcgctttcttttggtaattgtgatgaattttgtactgttgattctttattagatatgttaaaactagagcatcctcctaccatagaaagtgctataacacatgacaatttcataaaaaactttctatttttcattaaataatccccttttgtacaaattttaccctttggagatatttagctaagaaacacccactaaattcttctaaaaaaactaagttttgcgtgtatacaccttcacctcttacgaattcatcagttgtacaagtccaaattttaccgtcatagtgttgcgcttctccgcatgtatgcatcactactttatcgccttttttcaacatctctcattccccttttctacaaaattcaaatttcataaaattagtaaacaacatttgtataaataacttattttataaaatgaagaaataaaagcaaaattagacacgtaagcattcctggtaatgccaacttcaataaatcaggtaattccttttcaaaataaagaaaaattacatttactaacaagcatagcattatgaatagaaatacaaatgccataaaaataattggcactaataaaaatgaattcatttcatttctcctttctacaaaattcaaatttgattaacgtagatattcctctattcctttattcaacatcttcatccgaagaaattagttttactttacacttaacatctaactcttttaattgctcttctacaagaaataaattcattttagatgttctatgtctaagtattatgtctttacgcttttcaaaacaatcgttacagcaataaagtccatccataagttttgctgattctattaaaatagacttgtcacaacaaaaacaacggatgggtttatctgaattctcacgttctctcattatctacatcacctttttaataagatttctaaactccctggttaaagaacaaatagctttaaattctttttgttcctcttgtagcttatcttgtaataaagaaatatcatcaatagatgtaatgattttttctttgttatatattatttccttattatcatctttcatttttcactttatcctccatccattttgctaaatcgcttaggttaatttcttctcgtttaatacctgtttctgcaatataaggttcgacaacaagtttgttcaattcactatttagattttgaccatctttaatcatttcaaaaattacctgcatttgtttctctccctttgaacaaattaatcaatttatatattagattaatgtaaattaatatataaattgaaagactttagtcatgtattaattcttttacaaactacattaactaattatacctttaacttctttctaaaactaatttgttatttatcgtttttataattctattatacattgttatttatcgtttttatctggaattccaaagggttataactattgtaaatactcgcatataagatccttatattacacattgtatagacgttatatgtcctaaaggtactatcattgctagcattgtaccattttctgtacaatataaattttgactgtctacatgcaatggataaacattataattaccatttattgtgaatatattgatttgtctacttaagtacccttgaaaatattctggacctacaagcctttgactgtactctaaattttgcatatccaaactcctttctaattacaaacaagtatatttagtaatttgagtttgagtaaatttctcactaaccataagtcctaaagaatttgtacaaattacctctatactttgatcattatttactttcgttatatacactgttaacggattaggataacttgctcctacattatgttcaattataattggtttacttacgtaatggtataatgagtaaatgtccatatttagtgcccccttttatcattccttcataatatatgcctacagaaaaaattaatgctttaaccaaaaaagccaattaattcgatgaaatggaatatttttatattattatttataatatatttatatgttgcaaatacattttagaaaggatgattctatgaaacatattaaatctacactaccaattcaattatttgaaaaaaaatattttaatattgtagtcgctggaagaacaatggccacaatagaaatattatgtttcgatgaaaatgagtatgctgcacaagctaaaattattgaaactaataaagaagttagtacagctgtttgtaatccctcttgttttgaaacattagatgatgccctacaagaaattgtaagtttaattgatgaagaaattaaagataatgattgggtaaaaaaaaccataataaatacaaaataatttggaggaactatatatggaaaacaaagcactattagatgaaattgaacagctaaaacaacaagttgcacatttaacatttaagcaaaatttattatttaccaatggaagtgtagaacgattagtatttgattacgatctcactcaaatacaattcacacaaataatggatcttatggacgaatacagaaaaatgattggtgaaggtaaacaagtgtctcatcatgagtttgaaatgcaaataaatgctattgtgcctgatcacggttatcattttgctgaagctattacttatgctttttgggaaaacaagcgttgggaagaagtgtttaacgagctttatagaggtatggaaaaatacaaatatgttaagagagagatttagtaatgtctgtatgggatattgtaagtaatactaataatgcagttagtatagttagtagtgccattgctattggttctgctgcatggggtacatttagcagtaaaagagcctcaacagcagctaatacagcaagtgctcttctagataagttaaatgatcataaaaaaagatctgagctagaaaaaatacttcaagtggtcaccactagtatttctgaaataaggactattgggagtgaaaaatttcgtgatatgcaagctcgtggtactaactatcaaagtaagtatagtgagctagcgaaacagattagggatatatgcaatgatacttccactatacataatgatattacagaaaaattactacttattgaagtagaattaaatggttttagccgtcaagaatcagcactctcccttgatgaagaaaatgaaattttagctaaattagacaaagttctacaaactgcaaaagttaaatatgatgaaattgagggacgtttagcttcataatttacctggtgttttatcaaataattgaaaaggtagctgtgaattacggctgccttttgtttttaaatcaacgttttgaaaaaaaggggggtcttaatggctcaatgtattaaacaaacaggtcccacttgtggaatttatgcttttataaatggaatgtaccatattaatcagaagaaagatgtttcaaaggaacaagctgataaaatggtgtattcattcttagaggctaatattgttaaagatgaatcaaatattaaaacaggaactacttttgtaggtgaattttttgattttgaatcgtatatctcctttcttaataaaatcaaaaatactttcatctataaaaatatcgattatgatattaaaattaaagatattaattatttagatgatatcagtgttattgaggacatacaaaaacaaaattgttttgtcttattcagcattgctacccctatttcctggtggaatccgattaaattatacagattcttaaaaaaaggatctatgatttcacattggattcccctatatggctatgataataaaaaaaataaatttattgttgctaatagctcttctggaaaaattaaaggattttctttaaaaacattagctaaaaaaaataaacggttaaaaagtactacgttttattggaaatattataagcgatctaaaaagcgttttacatttaaaaaaaatcccatagaggatttagtgcaagctcaattaaaaagtaagaaggattttttagataaaggtatcctcatcccaaagattaaccatacatctggaaaaatagttattgttaaaaaaatagaaaaatagggtacgtgaaattatcgaattatctatactgttcttattcttcgtttaaatacattttctgtccttctaaaccaaaaccatggatattcctttgaaacacgcatataaaggaatctgaaaacccattttttatttgtcttctgaaaataggcattttcacaaaaataaaagcagatattctatagtttgactataaaatacctgcttttattctttatattaaacatatagcaattgccgatcccaatagtatcattccaacattatttaatatttttttgaacataatattattttcttacccttctatatgttatattccatgcatttaaatcattcatctttaattcttctgaagttaaattttcctgagcataaataaataggctaaattctatcgtttcacccattgtacactttgctttggaatgctttttatctattaattgatgagtatcatttttgaataataatgatctatctttacgtccacttatcttttctttttgaattaaaatttgtcccgccaaaatctgtgagaaatatgtattcacaattttatctaagaaaaacttatcctcttctttttgagaagtctctttccaatttaaatatttaattagcttcattgcttcgggcctaattctatatttttttatactataatctttaatatccataccatattcctcattttctatttttcattctcctttcagtataaggtatcttacatgttctttaaagcacttataaagggacaactatgtatttttataccactaatctctattaaaaaaactagggtctgaaataaacttgacttaaaccactacgggtacttgaaattgatactttctttacaccgactccactttgaatcaaattgaatactttatattcatactcaccttcaattttaaaatttaaaggttggttaaagtctactttaccttttgtataatccattttccatttatcagaatccatattccaatcatcaagtttcttttttactttctctataactgttggtgaaaattccccttcacgttcagccagacttactgcatactcacttagctcattcgcttttgtattatatacagtatggccagcaaactcagcaccaaagaaaattattgccattaacgcaatgaaaaataaaacatactgtattgcctcactcacttaatctcggcctcctttttctaaaaagaaagggtagttataataaactacccctcttgtataacttacattaatattattctattattttccccatcctgaaggttctactttagatccttttgtaacacttacaaagaagtcagcgatatttcctgttcctgttttcattgctactaataggattgttaaaactactagagcaactcctacaccaatatacatccatactgctttatctgtagtttcatctgaagattcatttaataaccatgatttactttttcttaatagatcttttcccttgtttaaaaatcctgttcctttttttgtttcgattgctaatgttttcataataaatttctccctttggtttgtatttttttataataattgcatatagcaatttattaatttattaattccttctattaaaacagattgacgaatttatcaaatatagaaacaaatgatattcccataattaaaataaccatgcctagataagcaaaaataatatatttagaaactaatcctggtctcattttaactaacttatcatgagattcagattgtagtttttgcattacttcaatttgtgcatttatgatttctttacttttttcttcatccatcttcatagattgctctagagctaccataaattgataagcggatggaatatttagtgcttttgcaaattctatataaggctcatggctaccaggttccagttctaatttagcaaccaattcctctgcataaggttttatactatcagatgcgtactcaattgatctttttgtcgcttcaaaggctgaaaatttagaaagcataaaccctagaggaatcatgagctctggtaactctagctccaaccttaattccctagacttaatgatactgttcaaccttacgttttcataaaagaaaaccagagctgaaattattaagcctactgttaagataattagcttatattgtggaaatatccatgcatatataagcgcaaataggaaaacaaatattgatattactaatttttttagcaaaaattcaattggtgtaatctttagatttgctttatctaattttatatttagttcctcttccattctttgaggtatccaattttttttaagctttagaattggttcaaagagcatgaatagaaatgttcgattttcctcattcttcctataccgtcctatatatttatgtatttgaaattttttattatttcttctttcaaatgcataatccactactaaatatattagtgagaacagcaagagaaacagtggaatcgtggttaatagattcactttatccccttctttaacttattttatttataccttctgttggatcatagaatgaatgttgctcgactttaactgcacagataatgtttacaagaatcattaatgtaagtattattttccctgtcggtgtccctgcaaaagcaatgtaatcatctgctgtaactgctaaaaacatgaatggaaatgatgctgtcataatagcaatttttttaaatgaagatcgttttggctccattcctgcttttaatttggctttatatatctttttttgctgaaattcatccgctattctcattaacaagccatcttcatcttttcctgttttagagataagatccaacatgtcatgaaataacttaagattcttgtatttatacttgttaatcagcggttcaaaagattctttaatactagttccttctaaatgtacgattaaacaattttcaacatcttctttaataggtgactgcattaaaggcaatatacttttaatcgcaaagctagggttttcatatgctgacatcgcatttgcaagtgaatttaagtacaacatcaactgttcttcaacatatagttcatatcgtttctttttataaaacatcataattctcggtaaaactaatcctactatcacaccaaaaacagcaaaattcaccgagataaaaaacccataaaatattattaccccaattaatgaacctacaattaaaagcatactataatctttaattgttaaattccaattgaattctttaccctcatgaataatctgattagggctaatccacttatataatccttttttcttaagatatgtaataaatttactatcctttgatttattatttaaaacatatttcaatgcatttttctttttattttgtatgctatctagattcgcattgataacataatagatggctgcaatcataattaaatatggtaaatatttaagatactgcaactgctgcccctcccttaggtaggtcttctttctccctatccttttgtaaatcttctaattgtttagtaaaaactctggcctttttcatctctttaattctgaaatcacttaaatagccagtctgtttatgacatccatctactttgaatctagttctacctttttcatcttcatactctgtttctgcttctatatcaaaagaaaataacttattgtactgtacttccccatttttataacctgtgtattcaactatttccgtaattcttcttgttccatccagtgtttgttctagatgaataccgaaatcaaagttatttgctacacttctatataatgactctaatgacatattaactttctctgaacacatgtctacaaccctttcaatactatcaattgcaccaaaagaatgtaatgatgtcataactgggtgtcctgttttggctgatttaaccatactccaagcttctccaccacgagactccccaataattagccattttataaattggcgtagtgcggatcggtttagtcgatctaagtcaataacattttcaaccccttctttttctcttgttatccaagttttaatgtcacggtctggataaataaattttaagaagacctccgggctatcctggaccatcagaactctatccaatttaaaaatgtaacccactaaatactttaataattccgttttacctgctcctgttgatcctgaaattaatattctactgcgtgttctcacaatagctttcaataaatctatcataatttcatttgcttgctgtgtttctaaaatcgactctcgactaattcttaaacccttagtaaacttacgaatcgcaagtgaaataccctcttgtgaaatatcaaatcccattaagttaatgcgcatgttagggaaaaaagcatcacactctggttttgaatatgaccaagtttgcccagatgcatatgcaaacttataacataatgtttcatatgcttttctatctttaaacttaatatcagaaaggtactttccttccttaagatcagtaatccatatttcatcatagtcattacaaacaatatcagttacatttggattttctgcaaaagcttccaaaatatctaaaccagctacagcatccactaataatttggttagttcatctagcgaaaaccctggaagattaggtttttcaataagatattgagaaaccactttccttagtgcagctttctttttttcatcaccaaaggattcttgaagtaatgatttatgttcatttttcaagaaatcttttacttcttttaaatattcttccggtagttccttttcatgattaacacctatactattacttgctttaatagtataaatatacttctcaatatcaatttttttctttttccctggactatgaccatacttctctaaattgataatatttttctttacgatctccatagtttgttaatgccacctcttttttcttcttgtttaatgaagaaaccaagttgacgagaaatagttttcaaatgcaaatcaattataggagagcccaccttcaaagcaaattcaaattcagctcgttcattgcaatacggaatgcattcagaaatatttaactcagttaattctccgtaaatatccttacctatattactactacaaagattaaatacttgtatccatttcttgtattgtaaatcagcttgttcaaagacatttgttaattccatatatctcgatagatatttagggctaccattcaatacattaatcacatattcacatttacgtaatattggtaatccaaaaatatcgtcaatttcacatggaaggttaaaaataactgcatcgtagtctaaactcttgattctattcattaatttttctacgaatttaatgataatttcttcgctatcattttgaaaatctggaaattcggatgcttgatactcctttggataaactagtaaatccaatgaactgggcaaccaatcaaattgttttgtgttactatgaatatctttttttctaaaaatgtaattttcaagatttaattgattatacaaaatagcttcttccataaattttcccatatgtctatcaccaagaggtatttgggttttattggcaaacgaaggatttgaataatctaactcaacaaacaatactttatgttgattttctgcaattatttttgataacgcatgagataatgtagccttaccaatattttgctctataccaaatacgccgataattttgggattattactccccatgtctatccctcactctcttatttcactttgtacgattgtttttgtatccattttacaatttgttcatctgctgttttttcaacatttgttttatatgctgttccacttgcaacagggattattttcccaattaatgtaccttgatttagcaatgtattttcttcttcattcactgcgaatgtataaatctttgccatagggcgatttttcgcttcttcttttaagctatcctgatatgaaccttccacatttatagttgcaggatcaaaaacatttgctgcattactatctttaaccgctgttactcttacatgttttgcaatgcggccaaagataggcttttctacaacctcacctttttcatctttatccttaactgttcccttaaagtacagatccacgtgactttctggaataatactattccctgaagaagtctcaatatctactaatagaggaaatgccacttcacttggttttaagtttaaaatagctgcatctggaagctcatctttagataccactttattcttaaaaacatatgaattctcgactaacccaaaaccatttacagtatatttccctacaatgtcattcggatttttaatcgcattagggggaatggagctatttgatacttcacgtacttgtaacatatctttggttatcttggttctaggtggaatatcaaccttagtaaaatatactttttgtaaattgaccttgctagaaacggcataattctcgtatccaacaatcgcaactactaatcctattgaagctgctaaagtaatagctaacttcttaggcgtactcttttttttcacatcttccaactcctattaattaggttttttcaatttttttgcttcaaatataatgttagcaaattgtcgaacactagctttttcatcttcttcttttaggtatttacgtatcggaagatcaaaagtgttataagattctacagcaagcatggatggctgagaagcaagagcatatatatgtaattgcttctcaccatcacttagatttgattgctctacatactgtctcacaagagcctcttttactacatcctcattaactgtaacttcttcatccaccctaacctgtcccatattaataccctggctcatagcgcttgctgctgcctgttctaaagttctgtcctcatttgtatcagctgcaaacaaataacttgaacttgcaataaacaatgtaaatccaagcaatacaagagccattattacaaacttaggggcactcaattacatcaccctttttaggttatttaaggttaaacttgctaaagaattcactatttaaatccacatttaatccatgagatttattatatgctttaatagattggtaaatttcaggactaattttataagattctttatgataacctggaggaatatctttaggattcggatatttccaatttgtccaccaattatttaaacttgttaacattgtttcttttccttgccaattccatcccaccttatcagggaatggattactcggatttactgatcttctaataaaatcatcttcgccctttttatttccaataaatgaaccttcaatcatcacttcgccagttagacataagtttaatttatttactccagcattataagatttaatattaaaagcatatttcccatctttttgatcaaaagatgtataccactttcgaccaccatttagaattatctcttttggattataagctgggtgatttttatagtctttatcaaagacattacctgaaaacttttcaacatatgtcattgggagtgaccaaaccgattcacttacagaattttccgtcttttccatttgcactttatatccatcatcaacttttggatattgcaaatgcttagtcattgttgggaaaaatgaatctgtatttttaggccctgttgcactacttttaggatcttcattagaataagttgttttcacctcataactaaatccatatcccgatctcaatgtttttctggataaattaattatctcacctgtcagatattcatagaggttatcctttgttcccttgtcatttattgttcttactacagcatgaatactagctttttctccaggccgaggacataatgacacttgatgactagatgtgtatataggtgtatctagtttattattcttaaagttcgtctttttaacatctttactgttatcatattttcgtggtatcggattaatttcagcttctatttgaccagatctttttaatgaccaatcaaagcttatggttttactctctccttcctttaaggtaacattctgcgcccctaccctatcaccatcaaaacttaaggtgacgttaggttctgttgaattgtactgagcttctaatgtttcaagtcgttttaatttatttgtttcgcattctaatttttcttccgctttctgaagtcttaatagaatactatctaaacgttcttcccaccatgaacaatctcttgggtaacaatgctgttttcctttttcatccacatagcaagtttgatccaaacgacatgactttaaattagaccgtgtactatctctatcatctttaagactatttacttctgattgtagagagttaatcttctcttttaattcacccctatatttatccctttcctctttaaaattggctctagatacttttacaggagtagaaatatttgttcctttttctgctgtttctccttcaattcgatctacagcaaagtccattttatacttaaaatcatctttgcacatattatcatccggattagtagttggtttatcatcgcaatccccatcgactgtaaaggtaattgttttttcctgggaagtcctttgaacaccatctagaacctttattttagcagtaaatcttccacacgactcaggttgccaccctattggattcacattgtcatttacaaagtgacctgattctttctcattcgctttagatggattactttttggtttcgagcgcatatatccgtttttcttatctaccaaatccccatctttataaatttctaagaaccaatgtacccggtttctttccccagcactttcttcgtatggattagtcgtggtactattcgggtcattatctgtgtaacctttgttttttgaaacatattcatagccctctagatcaaaaaacactggatttgatttggagccatttgttgcactgaatttagttatatctgggaaactcgtcctgacaatccatatgttatatggattaatttccctacttaaacctgcaccagcatatcccccacttaaataagctatatctcttatccaataaaaattaccatatcttttacctgtttcttcatgggatatagtatgtttatttatattacctaatacaaaatctccattaccaaaataaatattggatactatagaagcattcattctttccacttcagtgaccatccgattacctataggatttccactccctataactccatcattaattaaattgacaaaaggctctgaagattcagtgtttttaatcaagttttcatgatgattaccaaaattaaatgcaccattatacaatgctggataatgtatgtcagctgtataatatatattctcacttcctgggggtgtatatcctttacctggtcgaagtaacttaccaggtatttgtaactgcctagaagttagttccgtatctggagttccattatagaatggaacatcattatttctagcactagctgcattgggaactagtaacgagaatataaatatcaataaaaacaacaaaggtcttactctatacacgattttcctcctttcgtgtattggtggcatacgaactagtttaatttatttttatctagttcgtatgccataaattaatttaaattatttagattctacacggatataaagcatttgatccgctgttgatagcccaattcttattttgttattttctttttcatagttactaattttatgagttgctactacactatcaatctctgaatctaagttaagtgatggatttaatagattaacccattgtttagcaagttctacagttgcagcgttatttcctaaaaagtaaatttcgaattcatctttatttacgccttcaactaaaaattgtgaattaaatgtacctgctggtaaatacattccctggtctttaagtgctactgatacaccaatttcattaaatttcaaatttgtaccgtatgtagaattgacagatttaacaatgttttgagcgccacttgaaactgatttttgagcaatcggtaaattattaaatgctgtttcattaaactttgtttctggtgttgttaactcctggtttaacccctcaggtaatttttgttctggctttgtttctggtttttcctctggcttcacttctggcttagtctcaggtttttcctctggcttcacctctggcttagtctcaggtttttcctctggcttcacttctggcttagtctcaggttttttcttttctactacattaatagagttataaaggaactgactatatgcttcacgtgttacatgcatttgtggtgaatacatattacctcctgtaccaattgtaactccattttcttctaatgcactgattgcaccataagcccaagaatttttatcaacatctgcaaattttgttgttttcgtacccttaaatttaaaagcatttgtaagtacttgtgccatttgctcacgagttaagatatcatctggtccatacttaccatcaccaaatcctttcacaagtcctgctttagcaactgctaaaatctctttttcaaacaaatgtcctttaatatcagtaaaaggatttttgaaactagcatctgcatccgctggttttacgtatgtataaatcatacgtgctacttgtccacgagttacattgtcaccaaaaccaaagacattatttccataaccttgcactactttacggtttgttaaatcgtaaattgccttcgtagaccagtgatttgctggaacatcattatattttaatgaatctgtattatcagccgcattaactgaagctcctgtccctaaaactgctgtccccataatagtcaatgctgttgctgtagttaataatttctttttcattataaatttcctcctttttaattccattattctaatatacaatcattgcgtaaaaccagcaatgcattcatttatttcaatgacattagaattaatggtataacaccccctagcactgaaatagctgctggcaaacaatagtacatacgagttaccttccacccatctgtcactagcgagatattcatttttttaaatttaatactgtgatatccagttattgttttaaatcgtataaaagatttgaaaagcaataacaaagtaataaatcctgtcaaaattgatgagcacatgaaaattgcaatatgcactattaatgctgtatataatacgccttcctctggactaattaggaaataaaacaaagatgcaacaataatcatctttgtgtcaccaggagaaaaacgaattagtttcatattctctcgcaatatccctacaactagtgaaacgcaaactacacacattagatctaataattttatatgtgttattacgcccagacagatacaaagaactaaaaatataagatgccagtaacctttagtttttaagtacagaaaatctgtataaatgttaaagagcatatatgtaataaacagcgaaactatgagtagactcatgtaccaacccccaactactcaacatcaatattaggtatttgtaactacataaaaaattatttattagttatatatgactaataatgttcctttaggaacattatagcatatttaaaattaatgtacacattttttacaaataaaatttatcaatataaaaaagaactgaaatataggtgttcaccaggactatcaacctatattccaattctttttttataaatattaaattaaattcactatatttcacttcttaaaaaatctattaaacagagaagtttttttctccttcttatagtacttattacctataacctcttttattataatatccatactatctacaaattcttcatctatatctttatgctcaaatggaatcctaccatcgtatagacagttatatgtaattacgggatctatatgtggaatatttataaccccttctaatcctagagaattacataaacctttaccatctacccctttattcatcttattaaagataaaatatattgggtggccttcctgctttaattttacaaaattcattactttatctatttccttggcgattaaatacggttgaggatctattataataaatatataatccatatagctaaatgcatctagtggtacattctccccaaagtctacaatattaattgcctttttctcaaaatgtatttgttttattaattcattaattccccattcaccaattttactttttctagtatcagctacattccaataaatatcaaagaccttattattaaactccttgtttccgatttcattttgtttaatcatgtgaggaattgacatgaattgattatcctcttcttcgtgttcatgtagtaacaatgtatcaaaaaaatacggatttattggtggttctactatagaaattgctagatcataatcactcattgccattgcaagattcatagacacaaaactactacctgatttcgaacttaaaccgcatattgctatatttttatttgcaacggatactacctcggtttttgtttcataaatttttttctctataacctgcttttttgtaagtatcttggtttttatcttttcattagaagtagaaaattcatttcctacttcataatgccatctaacaacatcagcatatgttgtattcctcttaatatgcttttctattaaaggcgtgaagttttctcgctccttccctttttcatctatagtttcagtcgataacggtattacatctgtaatgcccatactcacaacagctgctaccgttttatcgcctggctctttatctatcgctaataatacaattcttatagatggcttactagcacgaatagatttaattccagttatcaaactagcactatctgtaacccctatatcaattaaaagtagctttaacgaaacctgagctgctgaaaaacaagcttgcttaaaactatcttcttcaaattcaccaatttttataaaagcagcctctctttcgagagcagcttttatctcttcaacaaatttaggacgtgctataataccatccatccttacacactacctttctacaaatgaatttcataatgctcacatttccaaccggtatcagttttaatccactcagcctttacactaatagcttgtacataaatggattgaatatcatccgtacctacatcatatgtagtcctatatgttgcataagatgtaatcttagttttttcactatttttcgctattgccctaagctcttggatgtctgtttgcttaacctttaaatcttcttgctttctttcttttatacttaaaaaattctttttagcttcaccaatcaaatatttttcaaattcctcggatttcccttcagacatctctttaataaatccattcatttctgtttttacctcttcttctgaatggaatttcgcaatttcattttttaattttcgattttccccataagtatatataaataaataagaaaccgtcataaataatatgactgccacacttataatcactctacttttcaaattgtccctctccttttagatacttaacgaacaattcgtccaccaccgtaatattgtctattccaatatccttcaaatacattatcaatttttatgcccgaactgtttgaattaatcattttcccatttccaatgtacatcccaacgtgtgtgacttttggccctacgtatgtgccgtagaaaaatacaagatccccaggctgtaattgttctttatttactcttgctgtggcattatattgttcttgcgctgtacgtggaagatttatcccagctgcctgtctaaaattccattgcattaaaccactacaatcaaaaccttgtgctggattagcacctgcccaaacataaggtcttccaaggaattgtgccatagatgtatatactttattagcatcaaatttttgtccgccacttccatctaaaactatacctccaccttgatttccagcttcacaattcatcgttagtccacccaatgaatttgctatttgtgttgttacaggtacccaatctttattcattccctgtgggtcattacttgcacccacaggagcatatttagcacctatttttggaattgttgttaacccctgtgatatgtatagtttatataagttctttgccataaaatctagtccctcatgtaaagtagaaaaagtccatagtcctccacttcccataattcctccaggattatttttctctcgaaccgcccttgatgttcctcttccggtttcgtgaaatgcgattgaaataaaaataactggatcaatcttatgtttttccgctatgcttataaaatcatctgtcattcctttaaatttccccgctttatccatctgttgacgaattaattccttatttaaagtaccgcttggtgtacacaccgctcctgttcctgtacctgcatcgggaaacatctgctggattgttcctgcttcaatcagctttttaacatattctttctgttcctttgtaaacttagcatcatccatcgcctcatctaatgttacagaggaacttattacacgttttccaggcatatcgctaatcttctttatattgttacttatactatttcctgaaagattaaatttcgcaaaaaaatcttgaactgcctttttccctttaatttctttactagatgtaactatttcttgcgtttgtttctcttcacattgaccagtttctttgtttgttttaatacatttttcttctgttttatattcttcatatttaagctttataaaatgataagctgaatcatgaggatcttttccgtctaaatgattttcgtacttgaccatatcaaatgcgaccagttctacccaattaatctgtaaattagttgctacctctatatattttttaatagtttcctctttgccacctggagttgaagatgttagcaaaagaaaagggcctaataacactaaaacaatcccagttatcaagaccatcaaaattggtttccaataatcttttaaaagtaaagctgcctttaagtaaatcaccgtttcaccttctaaaacgttctaaaaagaacatagagtagtaataattacctaataaaacaaactctacgttcttttaagaacaaatatatttatatttcaccttaattctattaacggcctccagcctcaccaaacataattaattcttctggagaaatatctatttttaaatgcattcgtctattaccagcaataaatagagcttctcccctattcccttctgataatgtatgtatttctctttctgataaagtcattaatttttctaatgcttcaatatctttttcaccttgtcctagtaaaattttatatacagggttatttagtaaggcttgtccatatcgctttacagctggatctaagaaatctactaaatcctgtgttattaccattaaaccgccttcatatttacgaatacgttttgaggtatttcgtaaaaacttaattgtttctgggacttcaggatcaattaataagtaacattcatccacaccaagtaaaaccttttcttttctattttttgaaacctcattccaggcccaacctaaaacattataaaattgtgcccttctaatctcatcattcgcctctagtaagttcttaatatttaatacaacaaaatctgatttaggattaattgtagtcggtccactccataaaaatgaatctgctcctaccgctgctgatcttaataaaatagatagatcaagccaatccttgctatttgcacccgttagagaaacgttggataagtctccccatttttttgtaagttcctccacattttccttcgataaatctaatagtataaagtataaatcttttaatgttggatactgttcattaggtatgtcttgtggattagtagcccaattaataccttttgagttatacaatgcttctaaggctacttccaataaactcatatctcttctacttatattacctaaatatagtttgaaaaatgttcgtaagaattgaaagtgatacgctaatgggccactattatttccttcaacttcttcatataacttttctttttcatctttatcatctaatgggacatctcttatctgtagggggtttattcgactttcttgtgatcccccacaatcaatagcatccccatccatatttcttgctaaatcaccatattcatcttctgggtctataatgataatttttgttccacgaccatactcaccacgcaaaatctttttaacagctgtactctttcctacacctgggcggccgataacagttagatttgagtttgttctactttctcgcctagtccagaaatcacaaagaataatccctccacctttatcagtacctaataaaataccttcaccgtcattaagacctgaatatacaaatgggaagcctgctgctacggactcagctggcatatttctagctcctatatctttaattcgattttccatcatcccccatgggcctacagttcttaatccttcttcttgtagaaacatcggtgttcttgcccttaaccctgctgctgcaagcatactttctactcttcggcatctcgtatttaattcatctaaatcttcagctgatactaaaagtaccaccgtcattaacattactttttgctgttctctatcaatcttttttaaaattgcctttgcatcatcatattgatcctgtgccctttctcttgaaactggatttcccatattttcaattttggctccaagttcacccatagaaacacgaatttcatttactaaatcatatgggtcaataggttccgtatgcattgacgttactacaccaggaatatttgcaattcgacttagccacgcttcccctacacgttgaggataatcagttataacaagtacacgttgaaatctatccccatagtttaattgtttaggctgaaaatttatcacactaggtgtaattacatctaagaatcctgacaattgatttttgccagcaatctttttcttcttttcttttaccttcgccatattttatgctccctcattttcctcatcatttacagtatcattaccattataaaaagcttgtataaatgggccattatctattggtgctctttccactgaagattgtgctgaatttccaaataagaattgtaaatcacgaatcatttgatcatcacatacttgtccggataaacttgctcctttaagttcttgtgcaatttcattacatgttctacgtaactgatcctgatccatatcatctttgttatttcggcttgatattatgatataaaattgacgttctaccgcctcaccaccactagacatcataattgcacgcttaatatcctgttctataatttttcttttaactggagtttcttcatttgcctttttctcttgtaacctataaatataaccatctaaatcaactggtctagcaatagttaatgtttgttgaccacgagttatcccgttataaacttcagttaaacttttaatttttcttcgttgttccttctttgataataaatccatattcaaaggctgaacttttataaatcctacaatcgaaccgtttttcaaatgaagcaattcattgttaatatccatcacgggcatccactgttgagcaactgctttgtttttttgagttgcaacttgctccggtgaaagattatttttagatttactcttaaaaagactcattaatctctttctctcccttcaccaaaaacgtaataaaatcgtttaggtctcgcattgaattgcctcatcatttttaaaatatctaataagttcactccagtacgtggattttgaaccgatataccatatcctatacctgcacacattacagcgaggaatatcctaacaattataggaattccgaaaactcctaataacagtaaaagcataaatccaactattgcacctgctaaggtgacgaaaatttctcgccacccaaaaccaggtattaattcaaatcgtgctttaatgtttttagggattaaatatggattctcaaactctctatcttccatagatattaagctcccttcgtcattgcttttctcattataactgctgtagctgcctgctgagctacacctgttgccattctccctgttcctgtactatgaacccaattttgaagggttttcggtactttgattgccacccaaagaatccccaagaataggaataacgacataatcggaaaatctttgtataccattgtttttaaagcctcaaaactaagttttaacataaatagctgtgaagcctgggctaatgatatcgctaaaacatctttccaccaagctgaatacatccctgaatttgtaaccaatccagtagccaaaagtggacccgctacagctgcataagctagttcagctgctctaatagatgtttgtataagaacaataataatggctacaacagccacgataaccgataataatacaaatagaggtataacagatgttgattttgcaattaaatccagtgtttgctttatttcactagtactcttgtcccatttggctccaggtaatttagctacatcaacagccatctgtgtaccaaatttatatacataagatacaatccaaggaatcgtacaaataactgctaccgcttgaccggaaccttttataagtgccataggatctgctccactatccccattcattctaagtatataagtgtatatagcttggaatgcaacaacaactacaacccaggatagagcaataacttgcgtatagattatggcctgttttacaatatctagttctaatacataaacagatacgccggcaatttcggcaattattttcaagaaaaattcaattgctccattaatccaactgttaaatatcttatctaatatgaatcccatgttttttaaccttcttcttagttatagtaactagcccaccatttaattaaccctacagccgatacaccaattgctgttgcaactaaaatctgtttagtacgtttatttgcatgtgcaatatcagctggatcattatcagacatttgctttttaaactgttgccaagcaaccatacaaccacccgcaataggaactagtgcgataagccatgttgtagcatcaccaatcatttttttagtaccagaataaatctttggctccccagccgcatatgctgaagtatcaattacaaacagtgctgcaaacaatacatatggtaatgcaaaagctaaataatgtttaaaactaatttttttctttttacctttattcatttttaaatctttattttctttcattccctaatcctcctaaataatgtccatatagctttctttttgttcagctacatctattggttcatttgtaatatccattgtttcttcaaattcttctgtctcagcagtttcttctaaatcatttgtcttattagctttttcgattgcttcaagttctccttcccattgcgctttaaatggatcaaatacatcaaatctaatatctttcttttccaaatcacccctttcaatgggtataaatttaataggatacttcgaaatatcaggagtagggactcttgtagcatattgacgttgcctaataacaatcgcttcaaaatctggaaatctcattacttcatcaggtgttaacagttcacgttttgatagattctgtgaataactagcagaaaagtctttcgttctagtagtagctgaatagccatcagttgcaactgtgtatgttcctaattttttactaataacttctgctgtttcattatcaccagtcaacaagtataaccagactctacagtttccggttattgtattagccaatttcccatacttttctttaatttgatccaatccctgaacaacaatgttatatctaactcccctactccttgaaacagtaattttagtgtcaaaatctgaaattctcggcatattaccaaactcatcaagtaaacagctagttcttattgcaattcgtccctctggtctagaatttgccaaattaaccaactcgaaatacgtttgatctatatataacgttgctaagaaatgtcgagtcttaacttcgtcagggataataaggaatgttgctgttttcttttcaccaggttgttttaaatcgtgatcttgaaaactagtcatatatgcaattgaaggatctgcaaataatcttaaatctgctgcaacagatgcaaagaagctaccacgcattttttcaggagccataccagctgtagcaaatgctaattttgcaaggtggcctcgttctaacgattcaatcaattccaataagggaacatattcctccatcatcccatcgccaatttcacgtttcttaactaccccatactcaactagcaattgaaacacactagccatatgcttttgactatctttctttgattctatggctatatataaaatcaatgcggcaataacactttcggctccagtagcccaaacagggtcgcccgtacgctctttttgatatacaatcatgtttgctatattccatgctgcttcagaagctttcgattcatcatcttcctttaaagcatctacaacagcttttattggattccaatgatgtgtactagccttaggtttacggaaatccaacattattacttcgtaaccctgttcttccaagaatttcttggttgctgcatataattcaccctttggatctgttaaaatcatactttcgccagcttttgctaacgtccatattgcaggataaataattcttcgtgttttacctgaaccagttgtaccgataattaatgtatgttcatcttccgatacaagccatacttttttcttttttaaatcagcccccaggactataccagctgtttttataggttctttttcatatttccaaacactattattagcatctctctctttttcagtttgccacctacttgtcccaaattgcccaccaccggatgcctctggaccgccaataccattcttcattttattttttatgcctctattttctttccagataatcaaaacaatagctgtggcaacaaaaccctgtaatattaaataaaatgttccataagattgcttcaaaattacccatgggtatataacggaaaatgtagttaaattattaataacaatttgaagatcaattcccttaaataaaaggtctaaattatatacaatctttggtaagattagtaaatcagctaaaatcacaaaaacaactaaaaatattcggaatttcaacctctctcttccctttcttgtctttgtttttgttcttgttcttttgctctcatcattctttttcttgcatattccatttctttttctgatttcatacgctctttttctaactcattccagaatgacttccatatcttattaattgaagcgttcggattcttgaatgatggcattttataaatatatggagctttaacatttaaagtctcatttaattgtttataactctctttatttacataggttgcttttccccatctttgattttcctcgttaagagctcctacttgttcaattattttttcgattttttcgggtggagcattacttttcacccgtctattccattcaagtacggtatctttaaccttttcttctgacatgcctgtagcaaatagaaccttactgtaatcccgaatagttttttcggtcatatcctgtactcttaaaggtctttttaagtattcaatgtcgttcgttcttttttcatatttttttattaccttagtaactaaactttgaggtaactttctttttttagcccaaacatttattttttctttaaataacgaattgtcagatgccacgcctcttaaaatccttgcatagacctcggttaaatgttctctatctggcacttccattttttcgactacaatattttctaactgcaataaagtttcatcagctttttgttcgtcaaactctaattcttgaaaagtcttgaatgggtatttaaaatcttctggtttaacacctatatttcctaatactttatcccatgtattcttacgtaaaaaattagatccttcttcgattttttcattaatcgcatacaaatctactcctgctatttcattagaacgaatccactctgaaacaacatcaattcttttactctcagaaacttcactttgctttagggcaacactcatgcaaaacgctgtccatccagctgccgcttcatccctgcatataccttgcgaaaatgtttcaatcattttatccacatcttcttttgaaacttcactgcgttctactaatttatatggataatccacagatacatctgttatttcctcaatcttgctaaaatcttttttcgatacaaagttagagttcgcttttttttcgatcttatttaaaactttttcaatcccatctaaaacgtcatcgtatctatttaacttggatataatttcattatttgtccaacctgctaattttagtatttcagctccagttttaatgtctttttcatcaatagttttaatatcttcttttgatgaattagcaatacttttgctaatttctttttcactaagccccaaatccgctttctccgaccaggtttcaaaaacccttttgatttcattttccgaaaaggataaatgttttaataatgctgcactttttttagtcacatcataactaagatcttgtttcggtttaccattagcttttataaattgcatttgtgccttcatcgctttttcttggtcaacttttggtagaaaattaatccttgtctctaatgcaccctttaaaagaacctgcgaaactcttttttgaatgtctttcattgctttttctttcgctaattctattctttcaggatcatgagaatgtaattttgttagaccttctacggaagataaataacgttctgtagattccataaactgaggtcgatttattaaccaatttgatatttcatcaacctcttttttgacctcatctggcataaatgcataactcatacggcccttttctggtaacattttggaaagttcataaagagacttctgcaatttttcaatatcatgcgtgtgtatgcgtggtgcaatgccaacttgtgttttatctacttcatctaaaccttttaacattttgactgcatctacaacgttgtctaaagcgaactctcgaatgaaatcacgttctacagtttttattaaatttaattcctgcctttcttcacgatatatttcattcataaatacattttttacatctctatgttcccctttagacaaagcccctctttcacgcttagtctctttttcccacatcataaggtgaacatgcggatggcccttttcctcatgaaaggcggcaatccatttcaaattactttctgtaatacccattttttttgctgcatctggaactgtcgaacgaagaagatcttcccatttccttttctccgtaaatcctagattcaaagcatcttcttcttttaagctaagtatcattcgccaaacaaccccgtcatgctctcttagttctttttgtacgtctttcaaaacgagagcttcattactattttgggtaaaaaggccatgtgatccagggcgttccccagcatactttgcatgatgtgcggcatctgttttttcttctaactcttcaaagtcttttgttgtttccatacttacgcctggtcttgttcctatgtattcaacatgggcactattttttttagcattagaagtgctaggtaaataaaaacttgttttcatgataaatggagctttcatacttctttttatacctttcaataaatcaaatcaaaaattttaaaacattagtaatttattattcatcaatatctccttttgaccttaaactttctacagatttaatccgtgcacgagaatatatgtctttaacatctaaattctgtctacctaatgattcaactaacatatacatcgctgtacctgctgaaactgatcctttagcaccaattttcgcaagacgttctaccgaaggtttcagtacatctcttaaagcttctcgtatttcaactttaataaaatccatattattttctgcataatgcctgtgtaatccctcttcacaaaaacgccttactacatctgctgtatcttctcccctctcctctgctaccgcatttaatttcgcttttaaatctgttggaactcggactctgagtaggtcattatacctactatttttatttttatgaataattatcaccaccatacattgttgctacgtagttatttagtactagtaaaatagtatcacattttgttcccacataaaagcattttattaaagtagaatgaacacaaatgtgttcacgaaaaaaccatgatataccaggctttgcctggtagttgtagccacgtatgtggcgtcccccttatcctgcattactaattttttttgctcaaagagcgaaaaaaatgtcgttcgctccacttcgttccgtccttccgtatcccccgatttttctatatatttattggatttacgcaaaaaaaaagaaagatcacttcgtgtaacgaaatgatctttcacgtatttcacaccttataatattcatgcagttattcacatattaattcttctcatattggaacatcatctaataataatttcttgattcccctctaatccatcctgaattttctccaaattgggatataattcataaatagcaccaatggacaaaattagcaaagctataaagatagctataggaatcctaaataatagtcgcatcttacttttcataataattataaatagtattaaagaaatccaaataaataagttagataacaatactttccccccctataaatgctaacttaaatatgtacattaacgcttgaataaatatgtacattttcaattggattctccatactgactaagaaatatatgacgtattataatcattatagatatcaatggaatttaaaaaagatgactcctgttggatacagaaaccatcttcttgatgttgcctaacttttttcaaaatgtcctttacaaagggtacagattacactactcttccttttctttatgaactttcaatttttaagtataaattcccgtctttcccaaaaactaacacaagtaaatgatgtaagttaggggtgagaaaatgttcggtttatcatctaagaaatcaaaaaagactaatacaaaaacactttgttctatcccagaatttatacaaaccatgaaagaatcaagcgattttgtctcttataacatacttaaagatgaaacgttgtgcttgttttattataaatctgtcgtggaagcacttattattaaacaattcattttaactcctataaaaaaggaatcggaacaaatccaaaacatctctgatttatgtaatattatctctattgaagacattattacctccccttctattgatgatattcgtgaaaaattattaggtggatatattttaatacgcttaaaaaacgattcgaatcctgatcaatatgctttaattcgtgccgaaagtactgttttaggaaaacgattatataacgatacagaaaatgagtatagcgtaatcgggcctaaaatcggtttcgttgaaaaccttgatacaaatatccacttattacgccgaaatatcgtaacggagcaactcatttttaaagaagttaccgtcggatctatatcaaaaacaaaagtagcagttgcttatatagaaggaattacaaatgaacaatttgtcaacaccgcaattcaacggctagaagacattgactttgatgtcccatttgattcaactatgattgagcaatttattagtgataatagcaattcaccttttcctgttctattacctacagaacgattagatcgagctgtatttgcattaattaacggggaagttttaattttaacagatggctctccatatgctttatcaggaccaacaacgttactggattttttcatttcaccagaagattattatttaccgtggatgattggatcgttctttcgtattattcgttttttcggagctatattttctcttttttcctccgctatttatacagcggctttaacatatcattatcaaatgatccctgccgatctactaggtcctattattttctcgagagctaacgtaccttttcctcctattctagaagcactctttttagaaattacaatcgaattgcttcgtgaagcaggggcgcgtttaccaacaaaagtcggacaaacgatcgggattgttggggggattgtaattggccaagcatctgttgaagcagctttaacaagtacaattttattaattgcagttgctttatccgcccttgcatctttcacaacaccgactgtaaagatgtcttctactatccggttgttacgctttccgcttattctcttagccggtgcattcggaggattaggcctcgctgtcggatttgtatttattttagctcatttaattaaattaaaatcgcttggatcaccttatttgttacctttatatccatttcgtggtttaggtacagcagaaggttttcttcgattaccatttagtcaaacggcacaaagaccttcttttcttagaccaaaatcaaaatggcgctacaatccaaacaaatcgaagcaaaaacgtgatggtgagaatgaatgaaaaaaattttattgcaccttatcattatcttcttcgttttacaaactggctgtacacaaacgtatatagtggatgcacagcgtattattcatattgctggatttgacatcacaaaaaacaaaaaattccaaggaactattctattcccagagtacacacatggtgtaaagtctaaaccagagacgcaaacaacatctgcccgttcacttgaaacaattgcttcacgattaaatgcgaaatctcctcacaatgttgttgtaggtcaaatgcgtgtcgtcctatttggaaaggctctaggggaacgcggaatgggagagattattactaacttacaacgtgacccaaatatcgggcgtgatgtacaactagcaattgtagatggatcggctgaagagcttttaaattacgggaaaaaaaatgggtctttatatattgctgatttactcgagcaaaatataagaaatgagaacattccacaaactgaattaaacatttttttatataattattactcttctgtatgtgatgcctatgttccttatattaaaatggacgataatcattctgtcgctgtcaaaggacttgcctttttaaaaggcgataaagtcgtcatgtatacggataaaagacattctgttttagcaaaattacttattaatcctacgaaaaatggacgttacgaagcagcaataaaaaaggataaacataaaggtatggttgtgatacaaaacttagctgggaaaaacaaatatgatatagatcaaactggcgacataccaaaagtaaaaatccatttaaaattaaatggattaattaaaaactctcctaattggattgatttaagaaaagaaacaaatatcaactatataaaaaaacaaattgaacgaaatgtcgaaaaagactgtgaagatttaataaaacaatttcaagaaaaggaaattgatccgttaggaatacgagatgaaattagaagccatacgagaaaatggaatataaaacaaattcgaaatatgtataaaaatgtagcggtagatataaatttagatcttaatattgtacaatctggaatcggagaatagtgaggtgaaataagcaatgaatacaatgaataaaacaaagacagtatctccatattttgcatttattttattgcattctctccagattggtataggaattctcggatatcaacgtgtaattttgaaaaatgcaggttatgatgcttggatttctcttattattgcaggtattgcaactcatattgtactgttttgtatgttaaaaatgcttgaaaaagacggagatttaattagtattcatacaacaacctttggaaaatgggttggctctatattttctgtaattttcactctttattgcttattattttgccttactgttcttcgtacatatatggaagtgatacaagtttggattttccctaccattaagttatggaaacttacgcttatgtttttattagtcacttactacattataaaaggtggcttccgttctgtgacagggatatgtttttggggtattgttcttcctatgttcgttgtattctttttagtctatccgatgaagtatgcacattttcgtaatattttacctatttttacacattcaccttttgacatgcttatatctgcaaaacactctgcattggaatttctagggtttgaaacaattcttatcttttatccctttattgaaaaaggaaaatctttaaaaagatgggcccatgctggaattgcttttagcaccttaatttatgtagttttagctatcgtatcttttatgtattacagcgagggacaattaaaccgtactatttggcctactttaacgatgttaaaaataattaaagttccttttattcagcgctttgaatatattattattttcgtttggtttttaattattttaccaaacctttgcttaaccatttggtcatcatgtcaaacgatgaagcgttcctttcatatttcatttaaatttacattaccgttttttattttcatcatattttcagcttctctacttttcacaaaccgtgaaagtatcaacacattaaataccgtactatctcaagcgggtttatatattgtatacgcttatatcccaattttatttctattccattcgctaagatggcgcttcaaaaatcagtcaaaaaaatcttcaaccgatacaccgtaatctctgatacaatttgattaatacatttgtaaaggggacaagcgaatgaaaaagtatgtattttctttacttgcagtactaagcttaattcttgctggatgcggaagtactggtacaaatgaccaaaaatcttctgaatcaaaacaagaagaacatgaccacgcatcgcacactcagcaagctgacattcaagagaaaacaaaaggagtcgacacacttccaaccttcctagataagcttgatccacaaatgaaagatatctacaccgtcgctggacaaaatgcagagctattagattggattccatgctattgtggttgtggtgaaagtgtaggacataaaaataataaaaactgctttattcgtgaaattaaaaagaatggtgaagttgtttgggactcccatgcaacgacttgcgtcaattgcctagaaattgcagttgaatctgcttccatgaaacaaaaaggaaaatcaacgcttgaaattcgtaactatatcgataataaatacaaagaaggctatggcaaaccaacacctacgccaatgccaaaagcttaaaaaacgagggaattcctcgttttttcttttcattctcattttttcttaacaaattctttcaagtgtatttctccttacttatcacacactatatataactctcggtaaggagggtacacagtgcaaacatataacgactatgataaagctctctattacacgtattgctgtaattgggataaattactcgttctcatggttcaaacgaacgatcaattattttctaagcgtattgagcattttttacacgcttatcaatacagcaaggaactgccagaagttgataaacaattgcagctcctatttcaatatattgaccacgcatcccaaaagtcgcatgtagaagaagtagaacaaattcaaatgtaaactatagcgctattctcttccggagaatggcgctttttttaaatttttatatcaataaaagtttctcctcataaaacttttattgataaacatattttttctttcttttccataccacttcatactataatttagtatgtaactattataagagaggtataaaatatgggacgagaaaaaaagcaagaatatgctttacttaccgcatggggagcttcttttatcgctacactgggaagtctttatttttccgaaatcatgaaatttgagccttgtgtactttgttggtatcaacgtatttttatgtatccattcgttttatggctcggtatcgctgtagcaaaaaaagattatcgcatcgcaagttattctttaccaattgcaagtattggtgcttgtatttctttatatcactatgcaattcaaaaagtcccagcgttttcagctgctggagcagcttgcggtcgtgtaccctgcaccggagaatttataaactggtttggttttattacaatcccgtttttagcacttatcggctttattacaatcgctgtttgtagctttattgtcatcaaaaacaaataaggagatgaaagaatgaaaaaaatgcttatatttggtggtattattatcgccttgttcgtagcaattttcgctgtcacacaaatggaagaaaaaaatgctactagccaaaagattgataatcctactgaaagtaagacaaacggtcctgactactacacaaataaaatctctctttcagatcttcaaaagaacttaaaagagaaaaaagaagaaacagtatacttttatcaaacatcttgcgttcattgccaaaaattatctcctgtcctcgtgccaatggctaaagacttaaacgttgatatgaaagttatggatattgaaaaattagatgctccttgggatgaatataaaattcaaggaacaccaacaatcattcattttaaagatggcaaagaagtgagccgtattagcggtgaacagccgaaagataaattaaaagaatggcttgagcaaacgaaaaagtaactagaaaaggaaactccttctacacatgaaatgggtgtaaaatcccacactaatgtataaggagggggttttatgccagaagtaagatgttctgtttccaactgttctttttggggacaaggtaacttttgtcaagcaagtgcgatcatcgttcagcctgatgcagatgaaactggtcaaactgaaaatgattcatatacagctgctgttttaacaaacgagacgctagaaagttctgtagcaacgagtgtagaaacttgttgtcatacatttaagcctaaatattaaacaaaaaaagcatgcgattaatcgtatgctttttacattcccctccaaaaatcatgcataataaaaaagtacaaaataacgagaacggccgtcccgcataaggtaatgcgccgatatatactcttctctccttccctcgctttcacaaacgcccaaataaatccgaagaacaatattaaatcaacatatggaacataaaaagaaaagacgagaaacgcatataaatacacgataaataaacaggtcgttactaaaaaaactttaaacgcaaattcacttttcataatataaccgccccctatctgtactgtattatattcagcaaaatataatagttgcagttaaactccaagtataaataagctaccgtctataaaacggtagccattacggaacattgtatttccgtttatatatattacttaaaatcgaagaaggaatttgctcgtaacgaattttctctcctgtttcatctataatatacgaattgtttcctatataatatattccatcttttcgttttgagtacactggatatctttcatttggcaataccgttttcactttcgttaactgtccatttggttcttgccaatatatatccgcgcggtctactaacgtaagtactccaatttgttcttcttctattttccgactattccagctcacaacgcgataaccaagcttattcgcttcatattcggggctcgtatgaaaacgagaaatgattacttttgtttgtaattgtactctgtcatacaaccattgtatatccctgtcatgcatgcgaatacaaccatttgattccctacttccaatcgtccattcccgatttgtcccgtgaatcgcatattcattcttatctagtccaagccacctcgtaccgagaggattattcggtgcacccccaggtattttttttcgatggtattctttatttttaaatttagttataatacaaaagttaccttcaggcgtaggtgtacgatctcttccagtcgttactggaaatgtttttgtataatttccattctcaaaaaaagacaactgatttgtcgtaagattcactaatattaaatgatctgtattagcaaaagcactaaccggtaggatgaaaaataatagtatgacgaaacataactttttcagctatatcccccctagcgctcactataataagtggaattaacattactttgctcttataaatgaaaactatccatttacaataacgcccccatttacatgtatcatttgtccagtaacataagaagaatcaccagacgctaaatatacgtatgccggcgctaactcatatggttgaccaggcctttgcattgggacattgctcccaaactgagagactttcttctcatcaaagctcgatggaataagcggtgtccaaatcggtcctggtgcaacaccatttacccgaatccctttttgcactaacgattgagaaagtgatcttgtaaaagctacgattgctcctttcgtcgcggaataatcaattaacgtttcatttccttcatatgcaacgatagatgccgtatttataatgacatcccctttcttcaaatgagaaagggctgctttcgcaacgtgaaaataagaaaaaatattaatacgaaaagtcttttctagctgttctgctgtaatatactctagtccttgctgcggatattgctgcgcgacattatttaccaaaacctgtaaactacctagctgctggacggtctcttgaacaacatctttacaatgctgttcatcacttaaatcacccggcaacaatacacactttacaccttctttctcaacatattgcttcgtctcattagcatcttcttcctcatctaaataagcaatcgcaacatttgctccttcttttgcaaaagcgatggaaactgctcgtccaattccgctatctccccctgtaattaatacattctttccttttaacttttcgctacctttataattgggatcttcaaactgtggtagaggattcattaatgattcaataccaggctgcttattttgatgttgcgcaggcattgttataaagtttttttgctgtggcatagctgctttcaactccttttccttagcatgtgcacaataaaaagctgaaattcacacatcggtttacgattaatattcgaatttaagacacaaaatatgaattgttataaactttttatgcaaaactattgcaaaatagataaaaaacgaatattatatataactgttgtgaaaattattcgtaaacagaaaggatgtttatatgtttaacctttcaaaacataaaacttctattaaaactgaaattatggcaggtattattaccttcttaacaatggcatatatcattgtcgtaaaccctgttatccttggagatgcaggtgttccatttgaacaagcatttacagcaacaattattgctgctgttgtcggaacattatttatggcaatctttacaaacttaccaatcgcaatcgcgccaggtatgggattaaatgcttacttctcttactctgttgtaaaagcgcatgaaggcatgactttcgcaattgcattctctgctgtattcgtagcaggtatgattttaattttgctatcatttacatctttccgtacaaaattaatggaagcaattcctgaaaacttaaaacatgcaattactgctggtatcgggttatttatcgcctttatcggtttacgattaactggtatcgttacaaaaaatgatgcaaacttagttggacttggtgatcttcactctgctccagttctactagcattagctggacttggaattactattatccttatgtctttaaatgtaaatggcgcactatttatcggtatgctattaactggtattatcgctttcttcacaggacaattaacattctcaaacggtgttacatcaatgcctggattaccagaaggaattatcgtttcaaatccaattactgctgtatctgacgtaattaactacggattatacggcgttgtattttcattcttccttgttacattatttgatacaacaggtacattacttggggtagctcaacaaggtggatttatgaaagacggaaaactcccaaaagctggacgagctcttctatctgactcattctcagcaactattggttctatgttcggaacgacaccatcaacagcttacattgaatcatctgctggtgttgcagctggtggtcgtactggtttaacaactgttacagtagctgttctattcgcactagcagcattcttcggaccattagtaagtgctgtctctggtgtatcagctattactgctccatcattaattatcgttggtagtcttatgatgggttcagttcgccacatcgattgggacacatttgatgaagcattcccagcatttttagtaatcttaagcatgcctcttacatcaagtatcgcaacaggtatcgcacttggatttatttcatatccacttatgaaagtggcaaaaggtaaattccgtgctgttcacccacttgtatatgtatttggaattttgtttgcttatcaattgatattcttaccacattaaaaaagtagagcatcgaaatccgatgctctacttttcttttacaacaatcattcaaactataaaggcacctccaaaatatgaagaaggttataaccttttaatacttctcttctacctttaattctttactatacttttgaatgaaaactgatgaaataaccattactatgcccacactaaaaccaataagttgatctattaacatttcatcatgaataaaccagcgaagtaaaaatacgctaccaaaaataaacatcataataaacccagtatgcctaagtcctttatagacattttccatatgtatcacctcttcacatagcattatccatattataccatacaaccatcaagtaaccgtatcgtcctctgacaatatgcagctaccttttgatcatgtgtaacaactaacactgtttttccttctttattaatctcttgtaaaatactcataattttctccccattttcttgatcaagagcaccagtcggttcatcagcaagtataatttttgtatcttgtgctaaagcccttgctattgctgttctttgctgttctcctcctgataactcgtaaggatatttgttaatatgcctctcaagccctaccattttcagcatttcttttgatatttgcatacgtttcttatgagaaattcttctatatataagcggaagcattacattttcaacaactgtataatcatctaatagcgaaaagttctgaaacacaaatccaacttccgtgtttctatacttatgataatttgacttgaatgtactcgtatccattccatctaaaaaatactttccagtagaggggctatcaattaagccaataatgttaagcaaggttgatttcccagaaccagatggtcccataatggctatcatttcgcctttttctattgtaagattaatatcttgtaaagcactaaaattactctttccgtatcccttagccacatttgcgagctgaatcatctataacacctctttcatatatgtattttttatttttagtacattgaaataaatgattgcatatataacgaggatcattacaattgataaagcacctataacaaccaatgattctatagagacttttaacgttccaaagaaagatactatactattttctagccctttctgaatttcaattactccgctattctcccattgaaaatacattatgcctatacatatcgctaaaacgaatagcaacatatactcaataataaatggaagacatatttgaaaagtgcttgcacctaacgctgatctaatagaaatatttttacgctccatataaagtgctgccattgatgttaatacaatagatagaaatgaaaaaaataagactgtaccgcttaataataaggggtatgacatattatcaataccttgtttttcgttttctaacaatttattcggatttgtaacataatacgaataacccttaccttctgttacctttaatactttcttttgaagttcatttatatttatcttatcatttgtttctataattaacccattgtataaaagttctacactatagaactctatttcttctgttccaattggtaaaatcgccatgtcatctaataatgtaatacgattatccgatatttcaccacttcgaggatatgtaaatggtgaatttttttctaaaaaaccaattacttttagcttcatttttaaagatggtataacatcaccaatagataccttttctatataattagcccctaatataacaggtctaatatcaaatactgatttatgaaattccgattcctcaaaatatcttccttgtgaaattcgtatacgaaagtacttattaatatctttatcaacaataagagtctttatcgttccattttctttttttaaactaagtgaatagttacggaacagataattagttttatttgttattggtatcatattagataacccttgcatgaaatgttgataatcatttttcgctttttcttcgctaaacaaggttatatcttgcgtcgcataaagttcatagaaatttttatgagtcgataaattatttgctaccgtcatcatttttcgatatcccgaaagattactaacaaattctattgctgaagaaaatgcaataattaaagaaattactataatcaaacttggtaacaaccgttttttcacagaccgtatagaatcaaatataaaaaacatgacgacctcctacgttcttaaatgttttccgggatatatatttataatgtgcttgattggaattacagtaacaaaaattgtaagaaaaattataaaaataacattgcatatcaatacatatagtgttaacggttttactaagtatgtctgaaaataagtatgaattgttcccgaaaatatttctaacgtaataaaaactaagaacatcgctgctagagaaataaacaaaatttgaatatatagttcgcagtagatagatatattagaagcacctactgctttttttaatgaaatctctctttcttttttataaatccaaaataaaaccgcagaaatgccagaaacaattgcaacaagaataaatttataataatacttatttgctggatctatatgtgtcacatgtagttcttgaagatctcgttcattcagcatttgaacatctcccgaaagcacttctttactcctacccataaacttttttatttcgttatgaatagatgatgtaggattaacaactgttaattgtaattgtttactctcgataataccttttttagatatagtaggtaagttttgaagtggaacgtatatgcctgctacacctacgtcactgtcttttcttgatatagttcctatttttttatatgtatcatcaaattcatataactcctctacattcgtttgatcgccaacaaccatatcgtttacattttcacgatgaaaatattgtccttcagaaatatatggcttccaataataatcatcttttaaattcacagctatgatctttgttgcccctgaactatttaatacttttaaatgctctacataaatatcacttttaacaaaagtatcttgtatgaaaggaattatctcttccaattcagttgcattcgctatcggaacagttaaaacttggttcttctctggaaaaccaatttgaaaagcagatataaagtttcgtttagactctgttaaaagtgcggctattgatatagaaagaaaagaaataaaaaatgacataaggagaattaagaaaaacagtttattgctttttatatttttaaaagctaggtacatgtctgtgctccttttaaataagaaggagatgatgaacatccccttctccttatctaaatatttataaagacagcggtttaatgctttttaccactgtaatcataagttaccattactatcaaaagtacctttgtgtgtatcttcttgatagtcattattctcatttgcataatgctccgagtatagtccttttgcaccaaaggcgttatatgcaccattactcacagttgcgtttaatgctcttccagattcatgggatcctaatttgtctgaagcgctttcaatatatgaattatttccatttgatttaataaaagaaattgctactgaacaacgagatgcattttgattcgtagtagtttgagctctgtaagatagtaggttaccgcttttgtgaccgcttagagttggatagaatgcacttgttgaggttgatgttgctaataatactaaagtcgtaattgaaaaaacttttcctttcattaacaatcacctcataaatttaatagtttagtagcgctacatcatcataatatcctttaaataaattctcctcaacaaaaaatcccaatgttttacaaactctttaaacacttaaacattcatacatttttaaaaagtaacgtataagtagcaatataaaaaagctgcggagaaactcttctccgcagcctaatacttatttttgcaagaacgcctttaaatctgcaaactgtctctttgcatcttcatagccttgctcgtataaattttgtagttttgctttatctttttccatacgatctacttgaagcggcacttctgggcgaataacaaataaattaccagcttgctcttctttttcaatatagtgaagtgtttcattatacacttcataacgattgagcatcgtgttaacaagattcggatattttttataagctttcgcagcaacccatccaaaccttgattttttcttcgcgtagccatgatttctcgttaaaataacgactgattttttaaatccatcctcttgcgctttacgaactggaattggatcagaaatcccgccatctaacagttgtttaccgcggtaatttactaccggtgcaatgaaaggcaatgaactagacgcttgtaataaatttagcgcatcatcattcgttccttctttttcaaaataaacagattgccctgtttcacaatccgtcgttcctacaaggaaacgttccgggctattaaagtatgtttcaaaatcaaacggcacatacttttctggaatttcatgaaaaatgaaatccatatcaaatagctgacgttttctccataagtttttatacgataaatatttcggatgtgatgcataatcaatattgaccgttttatttctatttctttgtctggaaagatacgacgctgcatgacaagcaccagctgatacaccgattacatatggaaaatataaatcttgttccataaagtattctaatatcccgcccgtgtacacaccacgcataccgccgccttctaatactaaccccgtattttcaagcatgttactctctcctctatatatattgactctttaattattcaccatgttaagtatctttttctattatatatgagttctttcagaaattatatttaaaagacttgagaaaaaggagttttttcttccaattatatttccaaatgatcggagacatcctttataaacctttgaataaagtcttgctcttctttcgtatatccatctaaaagtaacaaccacttttcttcagcttgcttatgcaatttttcatgagctttatatattttattcccactttccgttaagcggaagaagatttctttttgattatctaacatttgcatcttctcaacgaattgcttttgaaacaactttgtacaaattttagagattgctcccttcgtcatgcccatttctgtcgtaattgccgttacatttatcaaaccattttttccgatacattcgattacatgtaactcagataaagacatactacttacacctgtctcacgaagaaacttctcattttgtcgttttaaatgttcttcttttttatgcaaaagtgtacgaatgtccgaaagtatttccatttgcttcgttgcatgcttcaatccgttcgcctcctaagtttccaaagaaacaatttaactatataccattttaaaaccattttttcatctttacaagtgagaaaatcatgttaaaataaatttagtttcctaggaaactaaataataaggaggttaacatgatgaaaaaatctaaactaacttttattttatatgttgtctgtattagtgccttattcggttccttcgctcaaaatatttacacacctatcttaccgatgattcaaaattcttttcatacttctctttatcttgtaaatgtaacagtttcactttttacattcgttcttgcgattatgcagctcatatatggccctttaattgatacaaaagggagaaaatctgtccttattcctagtttaattattagtacgattgcttcaatcggatgtgctttttcggcaaacatttatttatttctcttttttagagctgttcaagctataggaatagcggctatacctgtagtttcagcaacgattatcggcgatttatttgaaggaaaagaacgcggagaagcgatgagcctataccaaatgttacttgccctcgcacctgcaatggctcctctcataggtggttatcttggcggtataaatggtcacttatctgtatttctctttttatctacacttggcattatcttattaatgataaacatttcactacttccagaaacaaagccaaatgtaattaagcagtctaaagcacaaaagaattactctcttatcttaaaaaataaaactggattttctattactcttattggcttcattcaattttgtatttacttttgctttctcgtttttttaccgagtattttaacaaattcatttcatttaactgtaaataaaattggtcttatgtttgtaccaatgtctctttctatcatgctaggaagtttttgctacaagtttttgcaaaaacgcctcacaacaaagcaagctttatttattacgagtttcttcaatattatatgtgtcgttttattctctttcacatatagcatcaatatcccattcatcattatcgttacatctttgtacggttttagtatgggactttctatgccaactcacactactttattaacagaagaattcgtacaagaacgtgcaacagctatcggtatatacaacttcatccgctatcttggtatgggtacagggccacttataggtggatttcttttatttaaccaaaattacttttggattttcttcctaggcgcaattatgtttttacttgtaatcttatatgcaatgaaaatgctaagttttcatgctgtacaaaaattaaaatagagcccccaaaatgtcggctctattttaccctctttgatccgcaacaatatgaatatcaatatactttgtttgtctcataatttcatttacaatagagccttttcgtatttcttcccaccttgttcttgcagattgtccaagtaaaatttgcgtcacttgtaatcttcttgcgacttcaataataacatccgctggttttctccctttcgcctcttctaatacaaaactcgcatcaaattgattggttaacgatttccactcttcaatcgtctgcttttttccagctgaaatagaatctatattttccctctcaacgtttaatacgtacaattcagcatttaaccgatcagccatgcgccatccccgtcttattaatttctccgctgttgaactgtattgtacacaaacgagaattttttcttttacgccaattggttctattactgtttggctaattttctcgtccatatcatcggcaacttctcgaagtgataattccctaagtgctcctaaattattaagtgtaaagaagttttgtaagctttgctgaattttttcttctttatatatctttccgtctattagtctcttccttaatacctcaggcgttgcatcaacgagctgaatttcatttgctttttgtaaaataaaatctggaattcgttctcttacttttacattcgtaatttgagctacaatatcatgaacactttctaaatgttgaatattaaaagctgataataccgatataccagcctctaacaattcctgcacatccatataacgtttcttatgtttagaaccaggaacattactatgcgcaagttcatccactacgactacttgcggcgcgcgtttttttattccttccacatcaagctcataaaatacctttcctttatactgtatttctttcaaaggaactttttctaaattagcaattgcttcttccgtctcttttcttccatgcgtttcaattaaaccaattacaatatcaattccatcttttttcatttcccttgcatcaaagagcattttataactttttcctacgcctggagctgctcctacatatagctttaactttccgcgattttgctgacgaatatattctaaatattcctctggcgttcgcctttgaaacttcggttcataatcatctgcatacaaaataaacactacctttcattcgaaacaacgctacctcaatcctttagattgaggtagcactgttgctattttattaatttctgtaactctaaatttaattttaagacgttcacacgatcttctccaaacaagccgagtgcagcgccttccgtttgatccttaatcaattgattaagtttttctttcggaatattcgttaatttcgagatgcgatccacctgcaccgaggccgcctttggactaatatcaggatcaagccctgaacctgaatttgtcactaaatctatcggtacttctgtaactggaacagctggatttttttccttccagtccgcaatacttttctctactcgctttgctaaatctggattagatggtgcatagttatttgaaccagatgcttcagccttatattcaatactagaaacacgcccttgaaaataacgtggatccgtgaagttttgaccaattaatttagaaccaatcacttcatttttatcattatatattagacttccatccgcattatccttcatcactgcttgtgcaataccagtaacaataagtgggtatacaagtccacacaacactagaaatgtaaaagtaatacggataattggtgatagtatactttgtttcttctccatctttttcccctcttccttatataaacaagccgacaatcatatcaattaccttaattccaatgaacggaacgataactccgccaagcccataaataagtaagtttcggctaagcaatgcattagaactcatcggtttatatgcaatacctttcatcgctaacggaatgagtaatggaataataacagcgttaaatattaatgctgataaaatcgctgacagtggtgatgttaatttcataatgttcaatgcctccatttgcggaatcgcaagtgtaaacattgctggaatgattgcaaaatatttcgctatatcattcgcaatactaaacgtcgttaaagcacctcgcgtcattaacaattgcttaccgattcctacaacctcaataattttcgttggattcgagtctagatcaatcatgttcgccgcttctttcgctgctgtcgtaccactgttcatcgctaatccaacgtccgcctgtgctaatgctggagcatcatttgtaccatcacctgtcattgctacaagtttccctttatcttgctctgctttaataacagcaattttatcttccggtttacactcggcaacgaattcatctactccagcttcttttgcaatcgttgctgccgttaacggattatcacctgtacacataaccgttttaatccccatttggcgtaactgttcaaaacgctcacgcatacccggttttactgtatcctttaaataaattaaaccataaatacgattatctactgcaactacaagtggtgttccaccctcttttgaaattaagcctgctttttgatttacatctttcggaattattccgccttgtgactcaacccattcaataacggcacctacagcaccttttctcactttcgttccgtcttgtaaatcaacaccactcattctcgtttctgctttaaacggaacaaactcaccttgttctgcaagttctctattgtatgatatagattttccctgcacatactcgataacagatcgaccttctggtgtttcatctaaaacagaactaatagcggcccactttccaacttgctcaatcgtttcatttcctacaggtaataatgtatgagccattcggttcccaaaagtaatcgtacctgttttatctaaaataattgtattaatatcgcccgcagcttctactgctttccctgacatcgctaacacgttaaattttgtcacccggtccatcccagcaataccaatcgctgatagcaaaccaccaattgtcgttggaattaaacaaactaataatgcaactagcacagcagtatcaatttgaaaccctaaataatttgtaaaaatcggcaacgtcacaacgacgatcaagaaaataagagttaagctcgttaatactgtatttaaagcaatctcattcggcgttttttgacgagcagctccttctactaaagaaatcattttgtctataaatgattcaccaggattactcgtaatgacaattgtaatttcatcacttacgaccatcgttccacctgttacggaacaaaaatcaccgcctgcttcttttataacaggagctgattcccctgtaattgcagattcatctacagatgctaatcctttgattacttcgccatcattcggaatcatttctccttgttttacgataacaacgtcaccttttgtaagatcagttgctgaaacttggacaatgtctccattttcttttacaacatttgcaaacacatctttcttcgactgctttaaagaatcggcttgcgctttaccacgaccttctgctaatgcttctgcaaaattcgcaaataaaactgtaaataatagaatgagagaaactgttatattaaaccaacctggtatactactagaactacttggaagaaaagataaaatgaacgtaatgataaatccaatttccacaacgaacataatcggattctttatcatgactttcggattcaatttcgcaatggattgcttcatcgcatgtgttacgatatcacgatccatcgttttcgcttgtctaacttcatcttctacagcatgtatttgtgactcatttaattgtttttcttttactactaccggtctcatcatttaccctccattacttcaatgtaagaaattctgcaattggtccgagtactaacatcgggaagaatgttaatgcaccaacaattacaattgttccgatgaagatgccaccaaataaactattatctgtacggaacgttccgactgtttctggcactaccgttttttctttcaacgaagctgccacagctagcatcgtaattaaactgaagtaacgtcctaaaaacataactaaaccagtcgtaatattccaaaacggtgtattatctcctaatccttcaaatccagatccgttattcgcagctgacgatgtatactcatatacaacttgcgttaaaccgtggaaaccggaatgagaaatagcatccgtccctaaatttgttgaaagagctaatgccgaaaagcctaaaatgagcaatggatgaaataaaatcgtgaccgcgattaatttcatttccttaccttcaatctttttacctaaaaactctggtgtccgtccaaccattaacccagatataaacaccgcgataattgcatacataataatgttcacaaagcctgctccaacgccgccatatactgtatttaacatcatatttacgagtggtactaaaccaccaattggtgttaacgtatcatgcatcgtattaacagcacctgtttccgcagcagtcgttactgtcgcataaagggaagaaaatactgttccgaacctcacttcttttccttctgcacttccttgtacatgctggatacccatttcatttaatactggatttccatgtaattcagatgtcgtaattgtgataaatcctagtaaaaacatcatgaatagtgatacgaaaaggatacgaccttgctttttatttcctaccattcgtccgtacgtaaacggaagtgcagttggtaataacatcataagcatcatttgcaaaatattactcatttgccctggattttcaaaaggatgcgtagagtttgctccgaaaaatccaccaccgttatttccaagttccttaatggacacgaatgatgcaactggtccgcgtaatatactttgctttgcaccttcaatcgtatgtgctgtaacagccccatctaacgtttgcggtacaccaagagcgacaaagattaacgccgtaataaaagcgataggaagaaatactctcgttaacgctctcgtaaaatcaacgaaaaagttaccgagttcttttccagcgagccctcttataaatgccataacgagcgctaatgttgttgctggtgctgcgaacattaaaaatgtaatcccgattaattgtgataaataagataagccattttcaccgctataatgctgtaagtttgtatcagccataaaactaattgctgtattaaaagcgagcgtaggctccattccttcaatatgcgctggatttagcggcaatacaccttgtaatctgaaaatgaaatatacaataacaatcataaatccgttgagtaaaactaatgataatgcgtactgtttccacgtttgattgtattcttttacacccgtaattttaaaaataattttttcaaaaggcccgaatactttatctagctttttgctaccttgaaaagctttttctaaataaatccccgttggctttgctactaaaataaacaagagcattgtaataatgactgcaacccaaatcataatgaatgattccccctaattaaaacttctctggatttaataatgcatacactaaatacactgtaattgctgcgacaataaccgataagacaatcatcatgattgctttccttctttcacaactttatctgaccaacttgcaagacttgccattgatgcaactaataaaataaaaatcccgaccattacaacatctaacatagctatccctcgctttgtttttgttaaaatttaccatttaaatgttaaaaaagaacactgagctctactcagtgttcaaaaaatgaacaacaaaaagtaaacctcctctctaaacgcttacgaggttagctgtcggattcgggcctaaagagtagccctactttcaaaactgaaagattcaccccaagtgacgatgcacaaaattggttcccccgctccatttctggaactcagcgattttaggtttttttggaaattttatgaatgatttatgagagtaaatatactcctctatatttcacttgtaaaggggtaaattactgaaaataataatatttacatccatttaaacgcttacattaaaggttattactattatttcatctattttctttatttctcttctcttttcttaaaaatgaccttttaaatatgaaataaaaagagcgaatgagatgaagtgcatagcttgttgcactcagcattcgctctttttattcaacctttattctcctcgtaaaaatgcacgtaaatttctcccgcgaatataaacttgtgtcaattctgcatgtagctgctcatactcggtaatatccacctctaaatacaaagcatcttttgatggtaatataatatacggccctggaaaaaggggatcgatctgaaccaattcttgaactcgctctaccgatactgcccaacgatttgctatatctccaagtaatagtaccttcatcatttcttcccccgccctattcaaaaaataaaaaagaaatattatcacaatttgtaaacacgacaaacttagctccaattgtttcatagagcctcgctggatatcgtttattccttgtaacaatagtaataggtgcttgaaaagaaaagcgaatgtgttctgtgaaaaaactaacgattgaaagctcatcccctagtaaaatcaccttcttaatacactcacaaatactagtaaagtcctgctccttactgcagctataagtccaatcaaacccacaattcctaacttcagccgctatctcttcatttgctgtaaaaataattaactcatgttgaaatgatactagatctcttaaactatctaccttactttcttctccaacacaaataagtgttagttccatgtacctcatcctccttagtataaaagaaatcaaacatagattgatattctcctatactaatcagatcgatgaagtgatgtatccatcatggcaccgtcctctctcaagacgcttacgaagttagctgtcggattcggactttgagagtagccctactttcaaacttgaaagattcacccctagtgcctacgcacaaattggttcctccgctccatataattggactcagcgtttacaaaaaaatgtattctggctgatatattactcctgtattttgaaaaagtaaacagaaaaaaagccagttataaaactggcttttcacttacctatgcacgcattctattcactttatatgcaaaatgattcgtcggcccatggccactaccaatattcaatggctcttcaattgctatactaataaatcgttttgcttcttgaacagcatcttcaatcgagtatcctttcgcaagtcctgctgtaaccgctgaagcaaatgtacacccacttccatgcgtttgctttgaaggaattcgctcgcttctaaactcaataaatttttctccatcaaagaggaaatcaattacttcattcccttgatattctgcatgtccgcccttcataagcacatatttagcacctaattcatacaatacttttgcagcttccttactatcttcaacattatgaatctccatcccagttaacacttctgcttctgggacattcggtgttataacagttgctactggtaataaatattcttttaatgcttgaactgcttcttgctgtaataatgatgcaccgccttttgcaatcataacgggatctagcacaatattattccagccaaactttttaatttgttctgcaacaatttgaattatttcactactaaataacattcctagcttcactgcatctggtgttaaatccgtaccaattgaattcaactgttctgtaataccttctaacggaacaggatataccccttgaacgccaagcgtgttttgagcagtaatcgccgtaatagccgtcattccgtatacaccaagctcttggaatgtttttaaatctgcctgaattccagcaccgccgccgctatcagaccctgcaattgttaaagctttattcactttcatcccactcatccttttctatccaaaatagcgatgataaatcgtttttgcttcgcttatatctttcgttccatgtacgagcacacggccatctttaaaggcgactaacctcttgtcttcaatagaaaatgatagtaaatatggatttatatttaaatcattcacacgaccttccaacaactctttatattgttcaaaatttatttcatctttatgaggtggtctaatttgaactgtatttcgcccgcataaaactgctgtttttgatgtgttctctttatttaaatacggatataatgcattctctccgcatgaaggacaattatgctggcgaagcttttgcacattcatacatgaatactcattcttccacatatcaaacgatacaagcccatctcgaagtgattcgtaatcttctactaacagtttaagagcttctgttacttgatgagaaacgacaagagatacagcaggtgatataatacccgctgtatcacatgttgccccgccaagcggaatcgactgtaataaacatgataaacatggtgttttactaggaaggattgtgtaagaaagaccgtaactacctacacatgcaccgtaaatccatggaatagaatatttttgtgctatatcatttacaataaagcgtgtttcaaaattatcagtcgcatcaataattacatcaacatttataacaagttcttctagctcttcagctgttacatcttgaacgagagcttctattgttacatcgctattaatctcatctaaacgttttttagccgctatagcttttggaagattattctttacgtcgctctctgcatacaattgttgtctttgtaaattactccaatctacataatcacggtcaacaattgttatcttgccaacacctgctcttacaaacatctctgcatttgcactacctaatgcacctgcaccgataataagcacatgcttttctcttatcttttgctgtccttcttctccaattggagaaaatagttcttggcgagaatatcgattattcaactacgctcattccttctaaaggactacttgcagttgcacaacgcttacgtgcaatacgacctgcttcaaatcctaaacggcctgcttcaatacttaatttcattgcttgtgccattttaataggatcttttgcacctgatacagctgtatttaataacacgccatctgctcctaattccattgcaaatgccgcatcagctgggctaccaataccggcatcaacgataactggtactgtcgcttgttcaataatgaagctcaaatttaatggatttacaataccaagtcctgatccgattggagatgctcctggcataatcgcatgcacgccaagctcttgtaatttacgtgctaatacaacatcatcagatgtatacggaagtacgataaatccttcttccagtaacatttcagatgcctttaacgtttctaccggatcaggtaataacgttctatcatcaccaataacttctacctttatcatgtcacaaagcccagaggcttttgctaattttgcaatacgaacagcctcttcagcgttttttgcccctgctgtatttggtaataacgtatattttttcacatcaagtttctctaataaattaggttgctttgcatcaaagatatccatacgacgtactgcaaacgttaaaatttcagcttcagaaacgtcaattgccttttgctgtacgtcaaaatcagggaatttacctgttcctaataaaagtctagaatgaaatgaaaatggtccaatgtttaacataatcaaccgcctcctacgaaagttacaatctcaatttggtctccatcaaaaacagatgtatctgtatgatcatctttttgtaaaatatctttattacgctctactacaacaattctgttatctaactctaaatgtgtaagtagctcagctactgtttttacactcgctggcacttcaatttggttaccattaatttttaaattcaaacttccatcccctttctaaacgcttctagaaagcaatgaatctagcaaatgattctcttgctttccttctattaaatcagccatatattgaccagaaataggacttaataaaataccgtttcgataatggcccgtgcaagcatataaaccttttatttcttcatgctctcccatataaggagcttcatgattcgattgtggtcgtaatcctgcccacgtgctttcccattctgcttcttttaaagctggcaatattgtataagcacgctctaatatagaagttatactttctggctgcacagttttattgaacgtatgtggcttcattgttgccccaattacgtaacgtccaccgcgctttggagtaatgtaaaatctttcttgaaaaataggtgcttttaaaagtttttttctacttcttaccgcaaccacttctcctttaactggatatgtaccccaatcacggtgaaaataacctagtaacttcgtgctccatgaacctcctgcaataacgactttctcacatgtgacaataccttcacttgtaataactccagtcactttattattttcaatacggatatcaaatacttctgtctgttcatatatatcagcaccggaaattgccgcagaatgtgcgaatgctttcgtaagctctggtgcaataacatgaccgtctttcggataatatactgctcctataatagattcggatagatatggctctttttcccgcacatggtctcccgttagaaaataagaatcttcacctgttttctgctgccaatccataatgtgaagtattctttccttctcatcttcattttgagcaatacgataaattcctttttcttcatatccaatatcaatacccgtcttttcacgtaaaactgctgcaagttgtggaaatatagctcggctttctctagcaagttcaaatagcggatcatacgcatcccattctgcctgaacaccaagtaaaccagcagctgctttggaagcttccgatgcaatactttgcttctccacaatcgctactttatgtcctctttctgctagaaaatgtgcaactgaactgccaattacaccaccaccaataatcgctacatcatacttctcacacatgtttttccgcccactttcttattgattccttataagatttcgctttgctatacgggttactactacttacaattccagacataactgctataccacttacaccgttagtaagaacatccactgtgttttgtggggtaattcctccaattgctgtaatcggtatagataaacaccttgcaatgtctgaaatttcttcaagccctctcgctggcacaccttttttacaatctgtcggaaatacatggccataaacgagtgaatccgctccatttttaaaagctactattgcttcatctagcgaatgcacagaataaccgacatgcaaatacgaaaacttttctttcactgactttacatctgtacttcgatatcctagttgaacacgaggaatatttaataaaattgcaatatcaattcgatcgtttatgacaattttagaagccggaaagccctccattaatagactttccacaccttcatataattccttcgtactcttctcacgctcacgaatatgcaaataatcaatctcactctcaatttgcatcgctacattcactaactcttcgaatggcatatggccatttgagattacgtggagctcatttttcatattcattcgcctactttaaaatattttcgaatagttcatcggctgggacggtttctttcgtcattcctttgtccttcagccacttattttgtttctcccaagattcttttgaatctgataaaaatggctcatctttcgtttccatcttctctaataaaattttcatactttccttttcaacttctggcacaagtgggaagttttctttttcttgatgatttaataaaatattcaatgcttcatctgggtttttcttcatgaaatcatagccttttttcgtaccgcgtaagaaagcttgcaacgcttctttatcttttttcaacgttttatcacctgttacaaacacaagctcatgatagtttggtactccgtaatcagctggattaaagtacgctggttcatggccttcatgacgcataacaggtacttcatggttaatgtatgcccctgttaccgcatctactttcttcgtaattaatgctggtactaaatcaaagccaacatcaactactttcactgtatcaggattaccaccagcttcttttaccatcgtttttaaatacatctcacttaaaggtgttccagagtatcctactgtttttccttctaaatctttcggtgattgaatgcccgctgatttcagtgatacaacatgatttaatggtgaacgtacgacagctccaattgatttcactggaatttgctcattcgctctcgccataacaacatctggctgataatacaagccaactgttaccttccctgctgctgccagcgttaatggatcagtcggattagaagggaatttaatatttacctttacaccttcttctttaaagtatcctttttcaattgctgcatagataaagctatgtaccgcatttggataccaatctaacatgactgttatttctttctcttttttacttttgtctgatgctgaattactcgaacatcctgcaattattgcaattaataatgtaaacacaaagatgcgctttaaaaatttcatgaatacttcctccaactaatgaatttcttttctaatatggaaataattacgacgaagaaaatagctaataatgataacaatacaataggtgcaaatacgccagctccatctaactgcgtcatcattctcttactgaaatatccaagcccagcttgtgcaccgagccattctccaattgctgctccgataacactaagcggaactgcaatttttaaagctgagaaaaaataaggaagagcagacggcaactttaatttaagaaaaatatctctttttgttgctccatatgtaactaagagctcctcccattcttttttcgtactacgcagtccatcatacgtattgaccgcaattgggaaacacgtaattaaaactgtgacaacaaccttactccaaattgtgtatccaaaccataaaacaaatagcggagcaagcgcagtaatcggaatcgtttgtgaagcaactaataatggataaaatgctctctccatccatgtactcgcattcattaacatcgctagcccaacacctaatacgatagagataacaacacctattaaaacgacgtataacgttgcaggtaaatgaactgtaaataatatgtcttttagtttccatatcttcattacaatcgcagaaggtgacggtaaaatgtacatctcatctacaattcttgctcctatttcccacacagctagtaaaatactagaaagtgtaatagcaggaactaattctttcaatcggttcatcacacaagtacctgcctttgtaacatactaagaagctcatctttcagcgctaatacttccggtttatataaatcttttcgtgttctgttatgatcaagcggtacagtccgctcagtcaaagtcgttatcggctgctgttccactactaaaactcggtttgaaagaaataacgcttcttcaacatcatgagtaatgaataaaattgttttttcccactcttgccattgttcaaacaaccattcttgcaaagaggtcttcgttaaagcatccaacgcactaaatggttcatctaacagcaatatttccccgcctgttaataaagttcgaataaaagatacacgttgtctcataccaccagataaatctttcggatattttttctcatacccttgcaaaccaaatttatgtaacagttcctttgcctttacttgtgcttctttcttctgtacaccttggcactctagcggcagggcagcattctcaataattgttctccacggcaaaagcatatctttttgcggcatatatcctacaggatggtgctttgtttctgtcagttctatctgtccagtacttaccttttctagacctgtaataaggcgaaataaagtacttttcccacatccactcggtccgataatactgacaaactctttctcatgtatagaagcatttaattcatggatgattggtttctcatcgtaatgaaaagaaacattatgaaactgtagtatgttcttgctcctcaaatccccacatctccttacgataggacatatcccagaataaatattcaaatcgactggaatataagaaaatctcctctaatctttctagttctgtctcagactttcccactgccatttcatttaataaatctattaaccaaatacacagattaccgtattcttccgaactatatccttgaatccactcaccaaaaaactcatgatctcttgctccaggaatatcatttaaacgctttccaatttcccaatagctccacatacatggaagaagcgctgctattaattccgcaagtgtgccattttgagatacagacatcatgtaatttgtataagctaaatttttagcagatggtttcgcagactctatctcctctatagaaattccaagtctttttgcatattgtttatggattgtcatttcgccatttaatattccatcaatttgttcagcgaactttcccattacttgtggattcgttgcttttacaacaccaatcgcatataactttgcataatctagcagatataaataatcttgaataatataatactggaatttatctttttctaacgtgccatctcccatacctactacaaacggatgattatgactcatctcccaaaccggttgcacagtttctaataatctatcgcaaaatttcatttctctatcccctttcaatatatgtatctaaataaaaaaccacttctatatataagaagtggttacagcaaataaagttatacatttattcgatgttccacttcccttcgctagtattacctagatcaggtgttgtaagggttaaggattattcctctctcagcaaatcaagcacccctagtggtttcaatatgaaattttcaaataaaaaagccccgtttctatacgcaaagaaacggggactcattgttagtgtccgaattgcttccctacgctagcataatctagatcaggtaataaaaaggatcaaaggcttacggcctactctcagctggcaacaccagctctcctagcaaactataaaattatcactgtcagtataacaccctaataagacatcatcaacttttttaattttcttaattattaacagaatatcaaatttatacaatacatacattctattttagaaaataaaaccccaattaattgcataagaaggaatcattatcctcaaaaaatttatttttatattgatttcatattacatttatgtgaatacacccactatattatatctttatactataataaaattacaactatacaactagaggaggtctctattccatgaatatgaaagctactgctttaacagcaactactgtagcgattgcttctttacttccttctatgggtgaaacaaatgtacaaaaagcaaacgctgaacaattatctaatattaaaactgggtatgtcaaagtcgatcaagtagcattacatacagaagataacgtaaaaagcacatcaattgatacaattcgctttaatacaaaagtgaacatccttgaaacaactaatgagtggtataaagtatctgttcataataaagtaggttatgtacaaaaagatgctattttactaaaaaacaaacttcattctaatgatcaatacatcgttaatgctaatgcattaaacgttcgctctgaacctaatttagaatcttccattttagatgtattaccaaatggcaagtttattaccgttcaagaagatcaaggcgaatggtataaaatatcgcataatggccaaacaggttacgtacaaaaagcattcatctctaatggttcacaacccttagtaaaaggaatcaccgttcaaaataatacaaaatatactgttgcaacacctaatctaaatgtacgtagcaacgctagtacaagtagcgctctactcggttcattacaaaacggtacacaagtacaagtagtagaaactgtaggaacttggtataaaattcgttttggcacaggatacggatatgtagcaaaacactatgtagtacaaaatcaaccacaagctaaaactgatcaaccttcatcaattccagctgctttcaaattccctgctcaaggaagaattagctcaacctttgatatacgctgggaacaaatgcattatggtatagatattgccgctccaggaaacgtctctatccaagctgctgctgcaggtaaagttgtgaaatcttattattcagctagctatggcaatgttgttttcattgcgcatcaaatcaatgggaaattatatacaactgtttatgctcatatgaaggatcgcactgtacaagctggtgatcaagtacaaactggacaattaataggtcatatgggaaacacaggtcattcatacgggcagcatcttcattttgaattacataatggagaatggaattttgaaaaaacaaatgcagtaaatccactgccatatttagttaggtaaattgtatgccacgcaatatacctcttataattgaatacgtagcctttttaggtttaatctgttgtttaatcatttacaatacaaacattgtatttttatctattattattgcttttgttgcattagaaattatgatggaatcatttcaagtgcaactaaaacaaaaaattgcccatatttataatgctatttttcttttgagtgctctcataacaaatataattagtaatggcttttatttatctactgtatttccagtattctttatggctgttttattatttgtagctagatatattaatgtcccttataaccaaaaacaaaaacaagaacaagaagcttagaaagaggagacactgtgtaccaatctttcaaagatactccaataaaatacatattgaatttgtataagaaagccaatactttttttgatatacaaggaagttatactgaacaacttctcctatatggaatgttttttcttgtcttaatcactttctctttgttttactaacaaaaaaggatctcacataaactggagatcctttttaatttatattaatttttcatatcgaaaatattgtttatccacaagcatatttttcataaataaagctcagattatattttttctctaagctcattcgttgttcgtcatcgcaccaatagaaaagaatatcatgaatcgttgcgtaacgcttatttttaagaaatagcctaaagaatgatggtaaacaatcatgtaattgtataaatatataattgcgtagtgtttcttctttatattcaatgcccttacaaatatacagtaattcttcacaataatatgcatgctgtggaacttgtatcatttcgaaaaatggcacataagatagtagctttccaataaaatgaccgtatcgatccattactcctatcgtcatatgctccatcatttctttcatcacatataaataatcatctacatgcgttgtctttaatgggtctaaacgatcggaaatttgagataatacagctctttgacatgctaaaactgcctgactaggtccataatatgataggaaatctgtacacttacgatatttccgtaataaatcatgtgtatacaaatcatatacaaaagtattacaatacattgctaaactcatcatatcactatttaattgctcttttgataatgatttcgctctcttgcacatataaaagaatgtaaattccaatacttctttatgagataataaatgtttacaatcggttatacacttctcattaaatttaactctatcccaaatttcaatatccctatctgtcaattcacctatacgatatttaataattaaataatttaaagcaactgattgcgtcaaaagatcccatgtttcatattccaatgaagtatgaacaaactcagctaatccttgcgctatcataaaatcatttgcctcttcataccaaccaatctcttggcataagcgaagaatacgcactaaagttggaatttcatctttatgaaactgcggtaatttctttgctttattcatgccatatacgataaatgccgctaaattttcttctttataaaattctttctctttccatactaatatagttcgttctttcccctcaccttttgggtgacaaggtacaagcaaagaaaataattcagcgaaattatttggttctatatatgtatctgtaaccaaattccaatttggatcgccctgtacagccttcatataattccccttcccttttcatctatgtaggaaatattaatttattatcgcaccactaaaaattaatattgttatattcaaaatctatcataatacttatatctatcagtatatcatcttttctcttattaaaaattaagaataacaaattttaaaaaaatgtcgaaattattaaccgtatccttattatataatgtctcagatacatcacgctaacatattagtttaatccatatatgctagaataatgtatctgaaatttatatataatttagctctttatgagtgaccattaaactctcggttaattaaagtttcaatttactctgtacgctctgagatttcactcaaggcaaatccagcttgatcatctgctgattcccttatagctaaatctcctagtgctaacatgccaataagttgaccactatcaactactggtaatcgtctaatttgatgctgtgccattagctctgtagctttttcaatagaatcatttggagaaactgagataatatttgttgtcattacatttgtaattttattagatccaggatgtttttcagcaatccctcgaacgactaaatcacgatcagtaacaagcccaacaacttgctcattttcaacaacaggaattaatccaactgattcttccttcattttaacagctgcctcatatacattgtctagcggtgtacaatgtacaatatgggtactcattaagtctctaactcgtgtcattatttatttcctcctttttatacataccatagcttttccaaaattcctttatttatttctggaaagtaacgtaataaaaaggattaacaaaataaaaaagagccagcataatgctgactcttttttgtatgacccgtacgggattcgaacccgtgttaccgccgtgaaagggcggtgtcttaaccacttgaccaacgggccatggctccgcaggtaggactcgaacctacgaccgatcggttaacagccgatagctctaccactgagctactgcggaacaatatatggtgggcctaaatggactcgaaccatcgacctcacgcttatcaggcgtgcgctctaaccagctgagctataggcccatatactttacaggggcagtaggaatcgaacccacactggaggttttggagacctcagttctacctttaaactatgcccctaaatgatgccggctagaggacttgaacccccaacctactgattacaagtcagttgctctaccaattgagctaagccggcataaaaaaaatggtggctcgggacggaatcgaaccgccgacacgaggattttcagtcctctgctctaccgactgagctaccgagccaacatgtaaaaaatggcggtcccgaccggggtcgaaccggcgatctcctgcgtgacaggcaggcatgttaaccactacaccacgggaccatttggttgcggggacaggatttgaacctgcgaccttcgggttatgagcccgacgagctaccgtgctgctccaccccgcgatgtaaaatattcactttagaaaaaatggaggaggtagagggattcgaacccccgcgcgactctcgccgcctgtcggttttcaagaccgatcccttcagccgaacttgggtatacctccgagatatatacgtctaatggtggaccttgtaggactcgaacctacgaccggacggttatgagccgtctgctctaaccagctgagctaaaggtcctttatggtagcggcggaggggatcgaacccccgacctcacgggtatgaaccgtacgctctagccagctgagctacaccgccataaatgatattaatataagtggagcctagcgggatcgaaccgctgacctcctgcgtgcaaggcaggcgctctcccagctgagctaaggccccatgttttttaggaatatcgggaagacaggatttgaacctgcgaccccctggtcccaaaccaggtgctctaccaagctgagccacttcccgttaataaaagcgcgcccgagaggagtcgaacccctaacctcttgatccgtagtcaaacgctctatccaattgagctacgggcgcatatggtgccgagggcgggggtcgaacccgcacggtggtcacccaccgcaggattttaagtcctgtgcgtctgcctgttccgccaccccggcatgtcatattgaaaattggagcggaagacgggattcgaacccgcgaccccaaccttggcaaggttgtattctaccactgaactacttccgcaattttccttttattatacaagaaataccctatagaatagacttttttcaagtgtctattctatagggtacattttaatataggactctttttttgttattcctgaaagtaaacttttaaattaccttaaacattgagttcacaccaaatcttctgatactctcaaaatataaaataaaagtatacattcgaagtattataaacaaagaagttgaatccctcataagaaaagatgagtatctcctcactatcgagatactcatccaaagaaaacataaattaactattagtatttagctctttactgtatttctttataaaaaacgccattattaacgtaataattcctatacctaaaccaagtaattgatctaacgaaattacatcacgaaaaatccaacgtataataaatcccgcactaaatactaatacaagtaaaaaaccaaaatattttagtcccccatatgcgtctcccatacccaaacccctcttaattttataattaattcatccataaatataaaatattattattgattttgtttttctctttcacctacaacccaagctactaataaaattgagctagttgctaacaatgctgtaaaaactcccattaaacatttctcctttttacaaacataattaaccatattataccatagtgacaatacttacaaagacttagttaccataacatcacttatcgggattcaatgtatctagaaaaaaccccttcagtttacttgctgaaggggtttcgtatttacataattatcgttattggaatcaaaataagcttacacatccaaactattgataatagctaatatttgatgatctgtccatttgccattaatccttatattttctttcgctataccttcttttttaaaccccactttttctaatacacgaatagatgctatattatcaagcatcgctcctgcttcaattctatgtagctttaattccctaaaagcaaaatctacaacaagttgaagagcctctgttgcatagccctttgcattatgctccttatctaaagtgaatcccgtataacagctttggaggtctcccctaacaatttgagttaatgaaatgtctccgataagtttatcattttctcttaaaaagattccaaaagggtatacttgtccttcagctgtcttttttagagcttgttcaagacgtattttttgatgttcttctgtataaaaaacttctgggagcaacgggcaaactcgttgaaaaaattcgcgatttctaatatgtaagttagctaactcgttagcatcagcagttttataaagccgaatataaatgtgcttccctactagtttcataacatccctccaacatttttatatgtctaatgaggcaaaagtataccgtatactttatacagttggctattgtcaggaatcattttgcacgaaagaaaagacactctatatgagtgtcttttccaatagtttttagcagaagcaagaagctccaacgatgattaataaaatgaataacacaactaccaccataacccataatagttcctcctttagataagaggggaaaactaaggttcactcatgtattttaatggattcgtttcatcttatgtttttccgcattgattgagcaggtcctttcgaagactattcacatattaactatatttttaaaaataaataatttaactatatcaatagatagataaattaatataatgtattaatcctaaaagaagggaggaatagccatgcaattagtttgttttaaaatagtaagtggtcaatatttcttatttgtagaaggtattcaaattcctgtaccaattccagcagttgctgcagctttattaattggtttaggagtaattccactttgttcttaatgtaaagaattcggaccattcctatctttccattggaaaagcctcaagtatatgaatacttgaggctttctttatatcagagaaaaaacaccttacagcgcttgaagatctcctgatttaattaatgcggccgttacatcatcaccgaaagtattgagacagaatacttgctcgtctaccttatccatcactgtagcttcacctatcttgccaccttgaagtttaataaaatagttatgttcttctacaattttactaaaatctctatttgcccatctttcagtaattgctaatagctcttctttgttcttgaaattgtttccgtttagaatatttcttactttctctgcattctttttggacataggggttgctccctttccttcacacgcttttactttttgatgagtcatgctatgcatagctgaaataacttcttcttcagtagaagttactgtaatgtgaagttgtgcatttgaacctttcacttctgcttcattcgatagtatgtcttctttattaacctctgcaaaaacatggtcctcacccttaagcgggacttcagcaaactgtaatattccataagtcataccagttgcaagtactactccccctataatagatgctagccaatactttagcttcttatccatcttcattcccccgtcttcgtttacatatcttaactaaagaataccatatttaattcctttttattgaagagtctctaatttctactatttaaaaatattctcatcgtttaatgtaatacgatataatcattttataatacaaaaaaacccatattctcattccctatttttttggaggtgattgtcttgaataaaaacatcaatctacttcttcaaataataattggaattataattatgattgcacctattctcataacaggatctatatacgatgtcactaaatcatttggtgaactattagtggcagaacttattataagaactctttctctcattattggacttttagttattagcacagctttgcatcgttattctcaataattattcatgttcaaaaaatacaaatattttacataccaattcttatgtattaagacatcaaaaacaagtgttacgaaaaaaatataaaaaagacatcttttttagggaaagatgtcttttttatataaaccttaatgttcgttctgtaaaaccctcgctgcctttactccctctttctcctcttttaaaaacaacgatacgataaaagcaacaatgataaagactaaccctagtgcaaatgcaccttggaatccagacgttaaaccgtttaacttctctactggatccagtggatttgcggagctttccatatagctagttgttcctgaagacattttcgatatgaatatagctgtaccaattgcgccagctacttgttgcagtgtactaaacagtgctgttccgtgcggatataaatctggtgttaattgatttaaaccgtatgtttgtgctgtcataacaaacatgagtccaaccattaatacgctatgcataacaataatttgtaccattgatgtatcaggagtaatgcctttaaataagaacattgctatccccactaacacaataccgggaacgataataactttcggactaaatttatcaaatagtttacctgcgattggtcccattatggcgctaataacacttcccggaagcatgatgattcctgatttaaaagctgtaacgagtaaaactgtttgcaggaacatcggtaataaagtcatcgttgaaaataacgacatcatcacaatgacgattaatccaattgataatgtaaacatcgagactttaaatgcgcgtaattctaaaattggattctcaatttttaattgtcggacgacaaaaatacataatgagataagcccaacaagtaaagtgccatacactttcgcatcggaccatcctaaatcacccgatgcactaaagctatacacaagtccgccaaatccgagtgtcgataaaaggatagatggataatctacttttggccttgttaactctgaaacattttgaatgtacttcattccaatcataatggaaatgatcacgacaggaataacaatatagaataaccagcgccaatttagtgagtctacgattactccagataatgtaggaccaattgccggagctgccatcatcacaagtgcgattaatcccattgtggcaccacgtttttcaggtggacaaatgattaaaatcgtattcattaataacggtgtaattaatcccgtcgctacagcttggacgatacggccgactaataaaacagaaaatgtcggtgcggatcccgcaattaatgtaccagctaaaaacgttaccatagcgatcaaaaacatttgtctcgttgtgagccattgctgaagtaacgctgtaattggaactaaaaccccaactactaacatgtacgctgtagaaagccattgaatcgttgaagctgttacgccaaattctttcattaatactgttaacgcattaccaagtaatgtttcatttaataatgcaaccattgcccctaaaagtaatgcaattaaaataggggtatgtttcatattagaagtatcaactttgccacttgctgggctcttagttgtcatattcatttgcaaattctcctcctgtttcttactaaaaaactttaaatacaccagaacacatgtaatataatatacatatgtagattaaaaagggagaatcaattttcagccactgtatatttaatctacaaaaaaggagaattgtagatgaacgataatgaaaaacaaattgatttacgtattagacgtacacataaattactatgggattccttatttgaattaatgacacaatcaaaacagaaatatagtacgatcacgattaaccaaatatgtgaccgtgcgatggtacaccgaacaaccttttataaacacttcgaagataaagatgctttattagcatttggatttaaacgatacagcaagatgattgcgggaataccggtttcagatcgattaagtaaaccatttcaagtaatggaacaatttctacaccatgaagaaatcggtaaaatattagaaacacaaatgtctgatgaacaatttattaaccggacacagtatttaagtcacgaaacgagaaaacaagaaatagaagcgttacatcaactgcgcaaaaatcatacgatgccaaatgatctaatcattgaattttattcaggggcaatcacctcattaagcgcatggtggtttaaaaatgaaagaaaagtttctgctgctgaaatggataggtatctccaccaacttattaatcgggatatttttcagtttggaaaagaatagataattttatcgataaaaaaagcccatatgaaatgggctttttgcatactatttattctctttcaacttctctaactcccgctgcacttcttcttgtaaatttttatctaacacttcttgttgattcggagacttcatattgtaaaagtagttgctagcagctgtttctgcttctaatttctgtacgtacgattcaatacgtgcaaaacctttcgctgtactttctgtatggaacgaatcaatcgctctgttgctttcttttatcgcttgcgccgcatttaaccttgaaacaagaacaagttctttatattgcaattctccatatttcttttgcagtttgtcaatttgttcataaagcgtcgctgtttgctcttttgttatttcgtactgctggcggtataactccgcttttttctcattcacaattttttcttgcaaagctaactgcgccatatgatcttcttcacgtgatacggcaagttccgcttggcgcgttctcttcgcaataagagcattcgtttctgaaattaatgcttcatatttcttttctaaataatattgatgcgaaagtgctttttccgccttcgtaatttgctgttctgtctcgcgaagatattgctttaacatactaatcggattttctattttatctagcgtttgatgcacatccgccactacaatatttttaatacgttttaaaatacccattattacttctcctccttacgaatacttctttcccattgatctaaaatatccacttgttggtgcacttgaaaatcgctgtatacatctatatgagttgccaatcttttttcctttaattttttatatgtccaaacaattatcgcaacaaatgcgagcaccggaagaactggtaatacaccaataactaggagcaatatgcctgtccactttttaaccatatttccttcagacttacgaagcatgtaccagccgaaaagaacaaatccaaacgctaacaagaatggtataaagaataaaccttcaaactctttttcgtggtgtttttcatgatgctgatctcgctcaaagttattaaatttttctttttgcgtaacgaaagcttctctttctttatcgtgagaaactgtatatgctgcttgcttatgtttctcatgaccccacctttcaaacttcatactatgtaatccaaacaatagtaatcccagaagtaacggaaggatcaaaatccattttaaccaacgcaattttttacgtttattctttttcatctgttcaccaccatctatccttcgttttgaaataagtaaaaaatgtatgacctccctttacctttgatacatacgattgtaaaacgtagacgtgagaagaaaatgaaggaagcatgatgaatatatgagaaatatataagaaatttctcataatgatttcaaaacgaaaaaacctaacttctccatataaaatagagaaattaggttctttttcattctttctattccctttcgtaaatcacttcccaatcttcttcaaatccgaactctcaataattgaatgcgaatatccatctttcccaactcgcaccatcgctcttcctaatcgtgctgaagtaattctgcttccgagtctcttcagttttatatttatgtatagtctttattaagacggaccataaccaataagatgagcaattataactgctattaaaccgatcgagtattcaattagaattaaaggaagaatccaccttgcccaccttgtccatgaaattcctgcaattgctaatccagccattagcgtaccacctgtcggaaaaataatgtttccaataccatccgcgaatgaaaaggataatacagctgtttggcgtgtaatgtccaataaatctgcaagtggcgccatgataggcattgtcaacattgcatgaccactacctgatgctaaaataaaatgaatcgctacttggaagttgtacattccaacaacacttaaaaaaggagaaatatgttccattccttccgacacttgatacagtagtgggtctataatatgcccttgattcaagacaactaaaatagcgcgtgatacaccaataattaaagctcccccgattaaagatgccgatccttgtgtaaaagattctactgtatcatcaagagatatcttgccaagaattgcaatgattatagttaaaataataaataaggctgcaatttcttttatataccactcgtacttaataacaccaaatacaagaataatataattgattaaaaaggccgttaatatccatttatgtctttttgttaactctactttcgctgttagtaggctgtcttgcttgtttgtatcgaattttccgtaaattccgcttgcaggatctctctttactttcatcgcatgacgataaacgaatgtaacagcaattacatatatgactacgaataaaacgaggcggaaccccatccccgaatacataggaagacccgctatcccttgagccagcccaactgtaaacggattcataattgccgttgtaaatccgacggacgctcctactagtaccatcgcagttcctgttatcgtatcaaatccaaccgcaagagctagcggaataaatagaggtacatacactaaagcttcctcagccatccccattaatgacccgccaagtgcaaagaacagcatgataataggaatcattaacttttcacggttagcgagtttttttgccatcgttgaaacaagagcctcaactgtaccggatgcctttaatacaccaaaaaaacctccgataataagaataaaaaagataatattagcagcttctaccatccctgtaggaatagattttaccgtatcaaaaaatccaagtggcgttgattcaatccatttaaatgaatttggatctactgttgtatacccatttttttcaatctgttcatattttccggccggcaatatatgtgtaatcacagccgcaatacctaacaagacaagtaacattgcaaatacgtttattttccattcttttttttcctttttttcttccggctcgaatgaaactgccttttgtgatacttgactcatataccaatcccctttgcaatagaatgaaactttaatcagtaggggatgttcttcccccaatgattattagttgaaccaatggggcttttacgggcagttgatcccccatctaacttctctttgctttcgctgaattttgaggggggtcttactgcccgttaaagcgagatagaatgaaactttaatcagtggggggttcgttcatcccccactgattattacttttacagacagccagcagtctggtttccccactaccatgacgtaccaagctatccaccaattctcttatttataacacgctatgatttaactacctttttactaatttcatttacaaattggttaaataaacgttgctgcaagacatccctttccgacatcatttctggatgccattgaaccgctgctacataacgatgagccttcgattcaatagcctctattacaccatcaaaggaccatgcactcgcctcaaaatctttccctaatgttttcactgcttgatggtgaaaagaattaaccattaaagatttttggccaatagcctcataaatttttccctcttccagaagatctactgaatgagagccttgccatttacggaactgttctcggacatggaaatattctggccccatctcgtgctctaagtcttgataaagagatccaccagctgcaacatttaatacctgtaatcctcggcaaattcctagaataggaatatctttttctaaagcctgctttgccaaatttaattcaaaattatctcgttcttcctctacagtacctatatatgattttggaatatcaccgtaataaactggattgatgtccgcgccaccagccaataacaatccatctaattgattaagtgtggactcaatttgatcaacttcctcaattggaagtagaacaaccgttgcacctgctcgttgaagtgaacggatgtagtcgtaagaaaagatagccatatcttgacctggcagccctcgtaagccctccttccctatttcactatgatcaacataataccccgtaacaccaattagtggtttcattttctctcacctcataatttaaatggtttcgttgtctttctctgctgaaattgtatactcttaacctcccttttctagcaagtggtaaagaattaaatatgtaaattatgactctactcatttcattatttctttacacaccattgatataagcaaatatcgtgccaacatcgaaattaaagtgattatttacatatttttaaatattttgtcgttttatcggtgtttactatgctgaaatgtattataattggttattaattggttacataatgaccaattaataaccaactttagaccaattccattcaactaaagaggtgctctatgaacaaatttgaaaccaaccacattgtattgatcaccgttttaaaagaaacacgaaaagccctacatcaacaactaacggagatggtagatgatctcatagatatcgaaagtttttctgtagaagaaagtattccaaaagtatttcattctacattaattgtgttacctaatacatttacgatagaaacggtgaaagactttattggggaaaactgcgaagtaataatagcaaaacgaacattaaattatgaaaacgtggaccagcttttatttttaccagaaggaacacaagccctatatgtgaatgataatcatgaaacagtatacgaatcaattgaaacgatgcgtcaattggggctaaaccacattgaatattttccatactatcctggaaaaacgaatatacaaatgatcaagctcgcaatcacacctggcgaacttgaaattatccctgattttgtagaaaaagtaattaatattggtcacagattaatagatattactacaatcatgtccattctagatcgatttcatttaatggaggaatcaggtaaccacgtttctgagagatactatcgaaaaatagtagatttaacaaagaatttagctaaagctcatcgacaacttcatcaagttattgatggtgttggtgatggcatactagctattgattatgaaggaagaattgttgtctttaatgaatttctggaaagcatgctgaaaataaaaagtaaaaatgctattggtcatccgattgatgccattattgataatatcgatttagtaaacttcatccttttgaataagcaacaagaaagcggaatatttgttgtaaacggctcggatgtaatagtagaacgcctacatataaatgatcaatcgattattgttacttttagaaatgcccttaagaccatcgggtttgaacgtaaattaagaaaagaatttgtcaaaaaaggttatgtagcaaaatacaattttcataacatcgttgggattagctctacgatccaagacacgaaacaaattgccaaaaggttagctaagactgatttaactgtattaattgagggtgagagtggtaccggaaaagagttatttgcaagtgctattcataatgcttcccagcgaaatagcggcccttttcttgctgttaacttcagtgctttatcggatgatttagtcgagagtgaattatttggttatgaagacggagcgtttaccggagcaaaaaagggcgggaaaatgggactatttgaacaagcaaatggtggcactatttttttagatgagattggagatattagcctgaaacttcaagcacgactccttcgagtattgcaggaaaaagagattatgcgcgttggcggaagccaaattatcccaatagacgtccggattattgcagcaaccaataaggatctactgaaaatgattcaagaaaatatgtttagagaagatttataccataggcttaaagtactctttatacacctccccgaattaaggacacgccgaaatgacattgaattattagctaaacattttgtcacactatcggaccctaaagtcaaaattgaacaagaactaattgaagaactgcaaggatatccatggtacggaaatgtaagagaacttaaaaatacgatagattacatgcttgctgtccgtaccggaaaccaaataacaaaaaatgatttgcctaatcaacattattttcaaaagcctccacataagaaaacaaatagcgatcaggcagaaaatattaaacccttttcttcaaattcaaacgctcttgatcaagaatcacttttcatccttacccttatcatgaattatgaagaaaaaggaaaagcaatcggaagaagaattatttctgaaaagagccaagaagtcgaaatgaaattaactgaggcacaggttagacaccgattgaacttcctgaagatgaaaggttatgtggaaataaaaaaaggtagagcagggattcatttaacaagaaaagggttggagattgtacgtagtctttagtcaaggttcggattttcagatacatagaggctgttttataaacagcctctttttttatggaataaaacgtcgataaatttaagttacaaatattcagaattaatattaaaatgaataatggggataggggtatgggcttataaaatttatacataacgagggaatagaaatgaaactacaattaaaagcggatttaatgttactactagttacatttttttggggtgcatccatcctacttacaaaacttggacttgatggcatagaagaatataatttaatcgcattacgatttattatcgcttttcttttatcaggtttaatattttacaaacatttatttaagatcgattttaaaactgtaaaatatgcatttatactcgcttctgtcttatttatcgtttacattttcgcgactttcggtacaaagtatacgagtgtttctaatgctggtttcctactatgtctcacagtcattttcattccaatattatcagctatatttttaaaacacattccggaaaagaaagtgatagtagggatcattttaacgataataggaatcggcttattaacattaacgagcgaattcaaaatcggtaacggcgatatattttgcatactgtctgcactgttttatgcgatccacgtcatcattactggaagtgtaacaaaacatgtaaactccattgcacttggagtcatacaactcggcttcgtcggcctatttagtcttattttttcattcattatcgaaacgccaaaactgcctagcacaaccaactcatggctaatcatcctagccttaagtatattttgcaccgcagtcgcattcatcgtgcaagttatcgcccagcaatacactacacctacccatacaggtcttattttttcattagaacctgtcttttccgcaggctttgctttcgttttcacaggtgaaacgctgacaggaaaaggatacttaggggctacgcttatattattgagtgtgttaattgctgagttggattttaagagtttgttgaggcctaattataagaagaatatagagtaaacatttcaatagaatcaataaacataccccagaaaaatatgagtttatattattttcattctcttcacttagattttctttttagatgctatcttcaaacaaggtagcatctaaaaaatgttaaaaggaatctctccttagtatcttcttatactcgatgtagtttgcatacttgaccttttctacgttctttaattacttattgaatatagtcatacagatttttcgctaacaataaacaagttactgtaatgaaaagggcacgaacatacccgctccctttttttatagcgaatttggagccaacaatccctccagcaatttgagcaattcccattataaaaccatacgcatagttgacttgccctacatacataaacatcaacaatgcaccaacattacttcctaaattaagaagcttcgcattacctgctgcttttaaaaaatcatacccaataaataaaagagaaaacattaaaaatgaacctgttccaggacctagaaatccatcataaaaaccaatagcaaaaacaaaaaaagtaaaaataatgacgtgtcgaccagacaattttttatgagtggaaatactaccccaatcctttttgaatatcgtataaatagcgaccgcaccaagcatgatcagcattaatggcttcaatacttctggattcattaaatgaacagtccatgcccctattatggaacctatgaaagtgagcggaactaatttaaacgccgatttcaaatcaagattaccagaacgataaaacacaatattactagttgcacttcccattgtcgatgctagtttattcgtagctactgcacttgctggattcagccctgtaaacaataaagctggtaaggcaatcaatccaccaccgcctacaactgaatcaataaatgcagccacaaacccaaaaacaatcaaaatcattaatacggatgggtctaaataaaaatccatactattaacctcccctttagtcactattcgaatagtaactaataatttgctaaatgtaaatagttattgtaacgttaaaatataaaagcaaacatcggaggacgaaaaaagtggactacatagtgcaacagcttaaaaaaattggtttcaatgaatatgaagctaaatcttatgtatctcttgttaaacaggggcctgtcacagcctatcaagtgagtaaagattcgggtgtcccaagagcgcgaatttatgagattttaggtaaccttgtagaaaaaggaattgtcatgaaagaagaaataaatgacaccacccgctattcacctctacctgttgaaatctttttacagaaggcgcaaacagaatggcaatctacttacgaaggaataagtgattcattaaaaaaactagaaacttccgaggaaaaaacggataatcgagtaattactttaaaagacaatcaaacaatcattagctactgtcagacattaataaaaaaagcagaacgacgtattgtcatttcaatgtgggatgagatgtatgaagcgttaaaagaagatctatctgaagtagctgataaagttacaatacaaggtattaccctacatgttgaagatcccattaaaaatctagaagcccatcgcataacaccttatacagaaaccttgtctacagaacattggtttattgtatcgatagattctaaagagatgatttatggaccatcacttgaagagcgtaatattgctttttatacagatgaccccgttcatatatacttattagaggattatgtatggcatgatgttttagtaaatcgacttgtccgacgtagccaagatgacttgcagcaatggattactgcagagagaaagtctttctttatggggaaatgaggaacatattcaaaaaataaagcataagcgaatgaaatagaacacttatgctttattttatttgcaaagtgatactccagtcttttcactatttcccctccacaaaccgtccaaactccttcataaacctcagcttaaaactccccacaggcccattccgatgcttcgccacatgaatctccgtcatctctttctgcttcgtttccttatcgtaataatcctcgcgatacataagcataatgacatccgcatcttgctcaatttgtcccgtctctcttagatcaaataaaagaggtgtcaccttataactatgtgacacctcttttttaaatatttaatgtagaatttttattattagattttaaatttgtttttcttacaattgctgttattaccttcattaacaataagggaataacagctgcgtatataatatatataattccatatttaataataacgcctaatccatccgtatctcgcattataaaagtgacgtaatctacattttcaaacagttcaataacatttgtaaataacctagtggctagagctaaacaccctaaataaaataaaaaactcataaatctagaattacctttcgttacatacatgagtacaaatgatataacaaagcccacataaatatatgtagcatattcaaccgcatacgcaataacgagaaatccaccgatgaaaaaagcgattaaaccgcctattaaaatagctaaaaacagaaggaatgttccttgtccagtaggtattggaatccctactgaatgagtatcattttgatttgatgctaaatcccatgtatcactattagaatctagtgtatatcctctgtcgtataatttattttctgcatctcgacttgcacgtgtattcccttcataatataaccgttccagttcttcatctgacttattcgagtgatttcccataaacttcccctatccaataattttttcatttatatttattaatttttcattcttttaaccagaaacagttattacaatcaatcttgttcggtaatataaatcatggagacaatactcttttcttacatattcatattaatagtcttttagctcgatcccgttagcggctttcgctaccattttcgagattaccttaaactggaagaccataaggattggtactcgtaacatgaaattgcgcagaaagattttaaagctcgatttttcaaccatgctcccagcagctagttttcctattttttgattcttctcaacaaatcccctcatctcttgctcataagcaacataggcacgggaatgatcaccatgcgcgtttttaagttcgcctgctaatacataagctccgacaagcgctagactagtaccttgccctgatagaggtgatggaccatacgccgcatcacctaccaatgtaattcgaccttttgaccatgttggcatgtgaatttgacaaatctcatcaaagtaaaagtcatccgcctctttcatagttttaagtatgtgtgaagtttcccagtcttctgtatggcctacaaaggcattttctacaagttttctttgagattcttcatcatagcggtcgtactccagtgcctctgattggaacaggagcataccttttgcctctgtattaccacgagcgctatacatacccacagttttacctggcattgtatacagcattacgcggtggtcaagattgaggtaattctcgagggtgaaaatcgaaatataacaaccaagtgtacgtttaaactgtgcttcatcaccaaaagtcagggacctcacattagaatgcagcccgtccgcaccgatgaccagatcaaacgtctgtggcttttcatgaataaattggacttctacaccatcttcagtttcatgtatagcagtaattgactcactccaaatgtacttaattgtatccttagttaaatcgtacaaaatattactcaaatcatcacgcatgatttcgatgtccacaccatgctggttcgcgaaactcgcttcacttaattgaccttcaacatcacctttgctgttcacgaagtacacaccggtcatgtttgtatcagctgcacggacttgatcgagtatacccatctgtccaagcaccgtaacagctacaccacgaatatcaaccccatatccaccagagcgcaatgcaggtgcgcgttctactacagtcacgtcgaagccataacgatgaagccagtaagcgagtgccggaccggtaatgctcgcaccagaaataaggacgcgtatcgcttttttcataattacttattcactcctatcctaatgaaagtcttaacataccctccagtatattcaccgcaacaaaataataggtattgaactattcaacaaataacccgcttgctgaaaaagtaaaaatcctgcctatcaatataggacatttgctcaaactttattacaaattatcaatatctaaaacgtcataaaaaataaaaggtgatacatctttggcatgtatcacccttgtaattcttgttcaacaatccgggccgtaatcagggatatcataccaccaacaatcatataaagtgctcaagaattcatcccctccacaaaccgcccaaactccttcataaacctcagcttaaaactccccacaggcccattccgatgcttcgccacatgaatctccgtcatctctttctgcaccgtttccttatcataataatcctctcgatacataagcataatgacatccgcatcttgctcaatttgtcctgtctctcttaaatcagataaaagaggacgcttatcttgacgtgcttctacggaacgagacaattgcgacaacgctactacacaaacatttaattcacgtgctaataccttaagcttacgagaaatttcactaatctcttgaaatcgattacctttatgcttcggatcacccgtaataagctgcaagtaatctacaataactaaaaccttcttatcaccgtgcttcctctttaacttacgagtttgcatccaaatatcttgcaccgtaacacctgcatgatcgtaaatttcaagcggtaactcaccaatctccgcaaacgccttactcaccttttcccagtcctccattgcaaaacgatgcttcggatttttcagcctacctcctgacacttcacctacgcaagacgccatcctttttaacaattgcttactactcatctctaatgaaaacaatccaaccgccgatccagacttcgccgcatgtagtccaacatttagcgcaaacgcagtcttccccatagaaggacgcgcaccaaggacgacaaaatcaccttcctgcaatccgcacgtcattttatttaacgatgtataaccagtctcaataccagtaatctctttcacatcttgatgaagctcctcatacaaatcaactaacgcatccttcaaatcaaactcacatacagagtctttctcctctaattcacaaagtgccgtaatcgtctcaccgataactttctcactcttctccgcaataagacgctctcccatcttgtgcccaagaacacccgcctgatacattttccaggcacctcgaacaagcccctcataataagagaagttggcagttgtaggcacaccatccattaaccctataaaatactccattcccccgatcccctctaaaaacttcggatttaccctagaaatgaacgtcacaagatcaatcggttgcccctctccttccatctttcgcattaactgaaatatagacttatgcaccggcatcgaaaaatactgctccgtcaaacggcactccttaataagctctccagcaagcaatagagaacctaacaccgtcttttccgcctccacattttgaatactcatggccgccacccgcgctccgctaaaaagcgctgcaactcttcctcagatggcgcattcttctcccactcctcacacctcgccaaaaactcctccgtctcccccgtactaacagacaactccttcttccgaaacttagccgtatctgcctcaacctcacacaatttcgtaaaccctttcccgtgccaccctctcaaaatgcccttcacataagcaatcgtccgcttattattctcaaacgcaatttgaagcgccttcagcacaagctcctctgacaaatcttccatccacgcactcagttcctccaccgcaaaaggagacaaactaccgaaatgttgctcataaaaagaaaacacgcgacttcccgtttcttcctctatctcctcacaaaccggctcaacatcatccacagccacatcaccaggcatgccgaaatgcgctaaaagcatcggaacattcagctcctcctctatgcacttctgaagaaacatatgtacaaactccttattcttcacacccttcagctcacgaagcacacacttctccacattcgtattcgtcacaggattataacgaagccaattcaaaacgaataactcccgcgtatccgcatcataaagaatcttcccataatcaacaaaacgctgcacaagcttatcaacagtctccctgttataacccgtctccatctcagctaaccgcttcggaaaaggaaaaatcccacactgcgtcgtcttcgaacaagttaacaaataaacataaaaataccgctcctccggcgtcaaatccaaaacaaaatcatcttgccaaaaattcacctgcacagtacgatacaccgccatcaaagttcctcccgtctccgttcaaaagtaaaagccccttcataatatatatgggaggatggcagggtttttggcgtgttatttcaaattttttttgactactactacggtgtttgttgttgtagttgtttttgttatgttttttcttagtgatttattacttggtaggggcttgtaaggggcttgtaaggggcttaggaggggctagttatcggttacttcgattagaaagactcatctccacattctgcttaaaccaattaaatgaatccacaaatctaataaaaaacatattaaattccaataaaaaagaccatatcaaaagcatactccgatgtcattttgatacagccccatctatattcgcttaataattttagaaacataaagatattaaaaatttaatatacctacaaaacattaccgtcctttatataatcatagatcttattatcaattgatttctccataatcatattcatcgtaacaacaggtagttcttttccatttttatctttcatttcagtttgttctacacttgctttatcaggtgtcgcttttcctaaatagtaaaagtcgcttccctcgtcatcatcttttttcacaaaaatatggacgtcaatattattttctttagcatcaataattgtttgaacttcctttgattttaatgttctattacttcttgtataccatttaagaacatcttgattaaggaattcatcaccgtagtccacactggattctacctcatcatttttatggtatgtgataaatattggacaagtatagtactttgtcttataaccatacatagttgagctctcgtcattatgccaatttaaaagtttacacacatcttttcttgagtattttttatatacagtaaggttactatcacactcatagtttttgctctttttccttgcacttttaataatgtccataaccatacgcttaaagtattgattttgttctaagctttttcggatagaatcattaaacatatacatcttatcgtcctgtaaagagagaattggcttttctccatatttcttttgactgttttgtgagaaaaactctaattcaaaaattcgttgtactgaagtaatcgtttcatcatctgttaagcaattagattcttcaagttgttttatatactcatccttatcaactttttcttgctttaataataagtctaacaaaacgatttcgtttttacgttttccattcaatacttccaatgaaaacatcgttaaaactttattttcgtactctgttaatacagggacatcttctttcattttcaataagaactgataatagttcgaatatccttctgcaagtacaactggatcaatagaatggtttactataaagtcatatagatatggagttcttcctattctatttttcaactcagcaaaagcttccttcaatactttcattgctgttaaattactattgttaatcgctttaaagatctgctttttcgctatctcttcaaagttaactgttgaaatacctttaatataactcgtgtcatttgtatatctacgtatattatctttattttgtgatctatctcctgaaagggcaatcggaattaaatagttatttttatagtttccaataaaatcaataatcgtaacaaaatctttcgaatcgtgttttcgaagtccacgccctaactgctgtataaagataatgcttgattgagtttgtctcaacataacaacttggttcacactcggaatatcaataccttcattaaaaatatctactgttaaaatataatccagtatgccattttctaattgattcacccgcagttctctttcctcttgggaatgatcgccggttaatgcaaatgtgcgaaaacctctattatttaaggcatgtgataattgttctgcctcatcttttcggctgcaaaacattagtcctgttactttcttaccagaaaaaccgtaatattttactttttcaactatatgatccactcgttcttccgtaacaagcttagataaaacagtagtgtcatctatcttttcaccattatattcaaaatcaataactccaaaataatgaaaaggacaaagcatatcttcttcaagtgcttcttgcaatcgaatttcataagcaatgttgtaatcaaatagctcataaatattaaaattgtctgtacgttcaggtgtagcggtcattcccattaaaaatttcggtttaaaataatcaatgactctatgataagaactagcaccagctttatgaacttcatctattaaaatataatcaaataacccaggatcaaattgatgtaaattttcttcctttgaaatagtctggattgtcgcaaataaatatttagcatttatttgcctatttgatcctgataaaattccaaaatcctcatctactccaccaagaaccttttgagaatctgattttgctttatttaatatttgctctcggtgaacaataaatagcatccgtttaggtgcaaaacttctgacatcaaatgctgaaagatatgtcttccccgttcctgttgcagagataactaatcctttttcttttccagcgtctcgaatagtttgtatttcttttaacgcagcttgttgcattttatttggggtaattttcaaagcttcttcaattgaattatgatattgaccaggtaattctataactcgatctagtaacttattttctgcaacttgttcatatattgtttcgtaatttccaattaactcttcagttaatacttgagaatgctcccaaacttcttcaaattgatttttaaaatgttgaacaatctctccatcttcatgcgatgttaacttgacgttccattcatagtttaccttcaaagcatgtgcagtcagatttgaactaccaactattaatgaacaatgtgttttgttatcaaatatgtatccctttgaatgaaaaccagataagtttgttaatcttacttctacattttcaagtttcattaattctctaaacacttttggtgtattaaaatttaagaatgtagatgttaatatacgtcctttaactcctttttgtttaagatcaaggaaatgtgactttaaagtcgctagcccactttccgtaataaaagccaccgagaaaataaaggctgtactattttcaagctcttccagcaatgagcttaaaacattttcatttttcttcgtattgtttactaataatttaggcttatatattccaggatgattatgtttttgatcaataaaccctttatataaagacccctctaacttttgaatgaaattctccatatgatcaccatttatgacaattttttatattaattgtattactcactgatttaaagtgcaaatttattacaataaaaaaactatccgcataaaacgaatagtttttttcaaattactttacaatcgattcttttgataatttctcaatagtcgggatatccgcaggtgcccactctaaagctgctagttcattcggatataaccatttaattgctacgtgctcagttagaaccggacttccttcaacaagtttacaatagaaagttttcaaatgaacaataccaaaatcatactcataggctgtataatcaatttgctcaccaatctgcacgctacaatgcatttcttcatcaatttcacgctttaacgcctcttgaggtgtttctccctcttctattttcccacctggaaattcccacataagaggtagcgatttagatggtcctctttgtgcacataaaattttctcatcttgaacaattactgctccaacaacataaatatttttcttcattatgtcctccttaaatctcacagaaactctatactttatgtttccacactttatagactgaaaaatgccttttatatcttttaacgactaatatatttttaatcagtaagctagattttatctatccctatgtagcccttttaatgtaattagcctaagactctcatctcttttatattatatagaagtaactacaaaaataaagcccgattgactccttccctcttaaacctcttttttcaacatttcctcatacctaaaatcacattcctccaaaaaccccctactctccccactccccttataaaaactctcccaaccccgctccctcaaaatccccttccaactatcactctcaaccatcctcttaataacaccatcccaataagcaacctcttcctccgtcatatcttttgggcccataattcctttccagtgctggaagatgacgttgattccttgttctttccatgttgggatttctggtagtcggtctagtcgttttggtgcggatacggctagtatttttatttttccggctttgtattgtttttcggcttcggatagggtcatggttgcggcgctgatttgtttgttcgttagggcatttatgattttttctttgttttcgtagacgaagaattgtagtttggcagggtttatgccgaatgctttgcttacttgtacgaatgataggtgatcgtcgtttcctaggccgggggcaactccgattttgaagtttttcttgttttgttttagttgtttcattagttcgtttgcgttttctatgtttgagtcttttgatacgacaacaacttcccagtccgatgctaatgttgcgagtggcgtgaagtctttatatgttagtttactgtggcctagtaggttgttcgttatgagtaagcttgagttaatcgccagtacgtgaccgcctttttgtttcgtatatttccatccgacatcaccactgccacctactttgtttgtaactgtgattggttttgtgaagattttttcttctgtgagcgttttttgcatcgcccgcgctgttaagtcccagcctgctccttgaacgttcggcgcaacgatttctactttgtcgatgctcattttattcgtatgggatctctccgaggaacatcccgctattactcctgtcatgatccatatacatagtaataatcgttttttcatagtcctcgtcctattcgatactttcgttctggtcgtccgataatgccgtatgtgtattctactgtgcattcgtttgtcgctactaagtattctaaatatcttcttgcggttgttctggaggcccccatttgttctcccatttcttctattgtaatgccctcgtcgaatccttttataattcctttcactttttgcaatgttaacggatcaacaccagtcggtaagttttttatgtcttgtgtttgcgaagtcccgaagaagttatcgatgagtgcttgatttacttcattgttactatgtaatagttgcttctttcttttatagtcttcaattgtacgaacgaatttttctaacgtgaccggttttataaggtagttacttacgccgtttcgaattgctttttctaacatatggttttcatttgccgccgttaccataatgacgtcaacgcttggaaagtcagcatgaatttgtggtaataagtcagttccaattccatctggtaagtaattatctaatagaagtaaatcgatttcttccttttgtagtagttctatcgtttcttttgcatttaatgcttttccgattacttttacgtcctttatttttaataaaaactcctcttgaatttgcgcgacgcggaaatcatcttctgcaattgcaaccttcaacatatgcccatccccctgtttgtcatgtactttctctcaatgttttcggaaggtaaattgtaaaaatcgctcccccatttttctcgttttgaatttcaattgttccctctagtagatctaccatttctttcacattcgctaatccgtaaccacgatcatttcctttcgttgaaaatcctttttgaaaaatggtcgtaattttttctaccggtattcctatcccactatctatcacttcaaatacaatatcgtgtcctatatccgtaacgaagaaggaaactctcttctcctcttgcccactcaccacatcaaacgcattatcgattatgtttccaaggatcgtaatgaggtgcgacacctttatatggtctggtaacggatgaagcgcactatctccttcaatatgaaaatcaattttcttctcagatgctgttccgattttccctaataaaattgcttgtacttttgcatcatgaatttgatggaataaaatatgattttggctttgatgaatattagattcttgctggataaattcaatcgcctctttgtaatgtcctaactgaagtaatcctgataaaacgaaaagcttatttgtaaattcatgtgtttgagcgcgtaagtcctcagaatactttcttacctcagatattgtgttcacaaggttttgcagttctgttttatctctaaaactacataccattcctaccgtactgttattttcaagtatcggtgtcatatttaaaataaacactttatcttgaaacgcgatttcttgatcgttttctagcactctttccatattaaattctggtaaaacttttgaaatgtgttgctgcatataatcacaatttacatgtagcatttcttctgccgaggtgttcatcatcgtaataaaaccgttttgatcaatagctataattccttcttttatagatagtaatatcgcacttctttcacggtataacgctgcaatttcatttggctctaaaccgagtgtgtctttacgaatgctacgtgctaaaagaatgccgccaataattccgactactaatacagctaaggaaaagagtataatttctttcgttctgctcagtatgttagattcaataccttttattaaaaactctactgtcacaacgcctactacttgttcgtaatctccattacgaacaataatgggtgctttcgccattaaagcaggaccacttgtaccatttccttcgagtgtataatagccaccaaaagtaagtgcctcatagttatacgggttgttactctttgtgccaattaattccgaatttgaatgggaatacatcaccccaaagcgatcttctataatgatataatctgcatcagcttgctcacgaacttgttccgcaatggattggatcgtacttttatgttctttattttgaaaagcatcttttatagctggcatgaaagaaagagatttagccgtttgcagtgctaactgttccacttggtgcttcgtatcaacggactgaatgtaaacaaatattcctgttagtaggagaacgacaaatacaattaacgcgataattaagcttactattttcgtttgtaatgacactttgcgtgattttttcatgcttcatatcctttgataaaatattcaaaactatcaatctcctttttctattattatgacaaaactgaaaatgaagcaactattaaaactctccatgtacataaagtacaaaaagaataaaattgtcataatattgagatttctaataaagaacagtacaattcaaatacaatgaacacgctttcatatataccttttattactaagcaagaggaggaattagtatggctcaagcaaaatctaatcgagtcgccggcaatattttcaaaggttctgtcggcaatttaattgaatggtacgattggtacgtttactctgctttcgctgtttacttctcagcagagttctttcctaaaggagatccaacgagtcagttactcaacacagcagctattttcgcagttgggtttttaatgcgccctatcggaagtttattaatgggacgctatgcagatcggcacggacgccgggcagcattaacgctttcgattacggttatggccggtggttctttcattatcgcctgtacacctagttacgaaagcatcggtattatggcaccaattattttagttcttgcccgtttactacaaggattatcactcggcggagagtacggaacttccgcaacatatttatctgaaatggctagtagtggacgccgcggcttttattcaagcttccagtatgtcacgctcgttgccggacaaatggttgcgttaggcgttcaaattgttcttcagcaattactaagcgaacccgatatgaaagcttggggctggcgtattccattcattattggagcgatgggcgcagtagctgtattatggcttcgccgcacgatggatgaatcagagcagttttcaaacataaaatcgcaaaaacgcgaaagcgcaggaaccgttcgcgctcttatgaaacacccgaaagcagtattaacagtagttggcctaacactcggaggcactgtcgcattttatacgtacacaacatatttacaaaagttcatggtaaacacagtcggtctgccgaaagaagttgtaagctggattaactttgccgcactacttattttcgtcgtacttcaaccaattgctgggctactatccgataaaatcggacgtcgcccactattaatggcattcggtattctcggaacattactaacagcaccaatcttcttcttcatggaaaaaacgacagaaccaatcgtagcatttttactcatgatggtcggtctcattatcgttactggttacacttcgattaacgcaattgtaaaagcagaactcttcccaactgaaattcgcgcacttggcgtaggtttaccatatgcactaacagttgcgatatttggcggaacagctgagttcatcgcattatggctaaaaagtattggtatggaatcactattctacttctacgtagctggatgtatcgcgataagctttattacgtattggcgtatggatgagtcatcgaaaacttcgcagattgaggcagagcttggtggtggggacaatttagttaataataaatctagttaaaatgatgtattctatgtttttctttaatctgaactcgatttgctttatctaaaaaagcataattcattaagatataatttaaaaacctctacttatatgtagaggtttttgtatgacgaaaaaacacgtagttccattgttattttacaaacccagcttctgttcgatatagtgacagcacataatttgaagttcaaataacgatgtcttgataaccaacttctacaacttgctcattttcaaatttcaccccgacaccgtcctcttcccaggtacaattgaatattaatccaactcttctaattccatcttcaaaatctggtaatataattaacccaacaggttccaccaattttcctagttcttgaatggttgttataatcggcgctattttatcagcagattcatcacctaccatatctctatattccatatattcttctttataatactcgaatattgcttgttcagcttcttttgtaagtttgtttatatcagtaatgaacttcctatatgcttcttcttgaactttaggaattaaatcatcttcttctccatcaatagttaaagaaactattttttcctgcccaaaaatagttatcttttgttgtccgctccaatataaatcgtgaacaatttcaccaaataattcatggtttatttttttcataattttattctcctgaattttttctcgataaccaattacgcccatattccccgaataaaaaaaataaactcatgttaaacttttcttattctttaggaacacagctattacatttccattcttatcaataactactctcaaattgttaatacgccttcaattagctgtagcaccaatagattctttgaaggtttgtccgtaacaaatagcatgattatatatttaaaaaataaatattatagtcacccaaaataaaaagcgtgagctattggacccacgcttaagaagcattttagtttaaatgtttttataaaagttaattttttagttattatttttatacattttttgtgcttgtccccaaacctcaattaaatctctaagttcataagaagcaaataaattattaaaggattgtaacccctactataagaaatactattattaccaaaggaagaatgataatcataaaggatattattattgttaataatgctttccatgctgaaaattggtgtgcttctcctaaacattttaaggaaataatgattgtccaaattccaataactatatcaattatggcaaaaataagaaacaaaatcgttaaagttatgctactctccattttcggtgtctcactcgtaaagttttctatcccaaacaagaaaaatgaaggcacccaaactaatataagagagtaaacgtaagggatataagaataggcaactgagtaacgtgttttctcaaaggtaccttgtccaccaagtttttttgccacccaattaaataacgctggtaacaaaaaataataaattaagaaggcaacgaaggtaccgaatataaccattgagattaatgaaactggactacttattgaatccgccatatttttagaagatgctcgatctaaagtctgtacgaatgagcctagtaaaatgagtaaaaacacattctttggtttggatataaaaatttctttcattgtatcacgtggttttgtccaaatggagaaccaaggattaagcgcacgtttaaattgattttctggagtttccatataaaaaacattcccctttcttaaaacatattaaatttaaatccctaattatcccaattatgtacatataaatattaaagcataaatagtcgattatttaaatgtaaatattcaatcatttaatttcatctgaaacttagggggagtgcttcttagcaattacctctatattttcttacatttttaactatgggctgattagttactttcatttttgagtacctcacattctttaatacacgggataaacagctataatcttatcattaataagaacaaacctaatttccattccttcagatgttttaccacaatataatcttccacttatacatcttttattgctataagcctcgtgaatggcttccataagaagaatgcgattatatacttgaaatgcaacaaattctctttaaaagcctatacgtattttccctccatcttctatatgcttccgtaaataataatacttatggagttctataatcatataaaacaaaccaaacgaaaacactgtgcatgcacacataaatacaatcgcacccatctgttgtgttgcaatgctaagaattatattagcaattaactgccccgatccagctgcaatagctgctacttttacaccaccaatttcttcattcttaaatgtttcttttatcataattaatttattttcttcaatgacctaatcctctctaactaaatagcttttattcttatcttcccagtatctatattcatagggtacttgttcatcaaatcgctgtaaataacctctccagttattcggaatatattcttcaaaagatattgattccggataattagaataaaaagttaaacgctcaaaatctattaggaaacatggattataatcataataggcttcttctctattagttcttagttctcttaaaaattctaacctaatatcttctgtaaatcttttatatttttctattctttctaaaaagttagctattgtagtctcatttaaaatactaatgccttttctttcttctggatattcactaggaggataaccagcttgattataatctaaacaccataaatctgattcagttatataccaattgagcttatttttatattttacacccactataatattttcggcgtataaaggcttaatcatttaactcgttctcctctcttacttaataagtttagcatttcgtccatattctactaaccaccgactagtggggtcaggtaattcgtatgcaataccttcaaattcatttttatcaaaagtacccttgtcaacaatcttaggagctgttctaccctcgttaagtggattagttttataatccttctgaataaaaacagcctatgtagttatacaggttcttcaaccataagtagttgttttcttccgtaaattacaaccttttttgtccctccttttaagagaacaatagagccatttggtaaaaacttttctttaaaaaattgcataattccctatccttgctttatctaaatgtaattctatattcatgatgttgcttctcccttttcttttccgcattctttactgactataggagaaccacgattatatacttaaaattcaatacagactctttaaatggtttcatgtgttctacccccatcttctatatgcttccttaaataatagtacctatggagttccataatgaaatgaaacaacataaacgaaagcatggagtatacacacattaatacaattgctaccatcttttgtgttgcaaaaccaagactgatattagcaatgagttgacccaatcctacaaaagccactactccaaaactagagttttttttcgatgattttgattttttgattgattcctgaagttttttaatatgatttttataataataatgcaaagcaaaaatatacaaaccaaccgaaaaaataaaatagataggagtttgtaatcctaacattccatatgcaaacttttgggttataactaataatcctactgaacatacgatgccaaataccccacgaaatagagtgtattgtaattgctgtttcctaggatttataacaatctatatcgcccacaatttacacttaaatacattggtatcaataaagaagaaaaggataatatccttgatacatttctcctttaatttctttaaaatatatatcaacctattaaaaagcaaatattagtcttcttttttaattaaaatattaaaagcaaaaaaactttaataaaaattcaaacccataaataaaatttaattatttttcttacattattcttttaacatacttaaaaactcactaaaattatctgcaacttcactagttaccggattcaattcttctgattcttcatgataccataccacaacagatggtatttccttttctctaaaatctaaacaaagaaaatcacctgcgaataaaacagcaaatggaataacatttatccctgttaaatcttcatcatccgttaaacgagtatcgatatcagataatacaacctctatatcataccaaccattttcatcatcatcttctgggtcctccaacaaacataagaaacgttcaattaaaagttcgtttttttcatgtgaaaaaacattagtaattggaatagagccattatattttttcaaaaaatctataaaatcatttggtaattttatctcacaatattcctcaaatgattcaattaattcatcatttggtgattgaagttcactaccatttttaatcttcattttaattcctccatttctttacctacctttagatctataagaccaatgtccttcactccgcccacctttatgaaatatgctattatgtattccaaatggtactaattccattttacctggcatctaaccatttaaattgttgtttgtcacttgccaaccacatttcctctggtaactcatccgatttaataattaaaccagctttcttaaaatcaggatattgtgtacctaatttcataggaacatcaggtattaaacctttctcaatagcaacctgcctaataatagctttttggggagctgttaatttttctccaccactaatctacctccatttccacggactattagaatttactactgcagcattatattctaattcaaaatcgagatatttcccttctacagcatcgtctaaaatctttatatattcatccacttcatataaattttctataaaatcagatacaatagcaatctcttcctgtaaacgaattcttaatccactaaatggattacaccaaaattcatgcgaactatctctccacccatcatcatatctaaatacctttagattcttttgcaatgactattgctgataattatttaggaaaaaagactttaaaacctgagataatggagaaatatgaaataatagatagagctgacctctataagaagtcagctctatctattatttcaattctttattttttccttttttaaattctttttgtttatcttgccaaatatgaattaaatctactaattcaatcgtttctatctcacaaaaatctcccttaccatcttcagccaaattgtctaggacagtagttgtatctttccgaatttctaaaccacaaatgtttccatttactactacgtaattttctttcccatttaaaacactatgtatttcttctaaaatccaatctccaaacgcagaaacttcaacgcctaaaaaagtctccataagtttaatttcttgaggaagcctcataactagttttccattggtaagtacttcaaagctatatggatatttcattactattgtactcctttatactaaagataaaatttattccgctgggaaagcagagataattttcccattcccatctatatacatgctaatccttataccctctgaacctattccagaatatgtgttaccaaattcatacgttctattattatatgcttcatttatattatctacaatcttttgcgggctccaatctttagggaaaaatgtagaaaatcctctatttccagttttaggggttccattcacttctaccctagctttataaatgccttgatcatttaatatctcttctgttccgctaattatttttccaggtgtattctccaatacttcagtatgataacccattgcgtcaccacgccaatttatttcaccctctaggatatgtttgagtgtatttggtctaaatttttctgtatgttgtaaattagatataatttccctattagaaagtgaagatctatgattttcattaacaaaattactcccaccagaattactttcacctctagcaaactgataggtcgacagcttttcttcagcttttttaaaatcaggcgtatcaaatctaaatcgcaaactatttccaccagcaaaagcaaagcgatctcccatttgtaaattacttgtaatatgtgaaacagcttgcggaatcttattttttgctagtttggtcactttacctgcttgacctaatttacttgctttacttaatcctttatcaccaataaatcctaatccaacttgtgttaaagcataacttccccatttagcacgactttcagcatctccatttattacatcattaataaatgaatctgacaatacattatacatcgtactgagggtatcaatagggtgcaaagcagcgttccccatgttttcccacgtttcccaatctcctaaagcttttattccgtctattgtatcgctaactgcttgtcccgtaccatctacaataccgtcccaaattttttcaccagtagatttttcaggtagcttaccacacatttcaccttcttcaattgaattggtagcttgtcgtgccctctcttctgtaatcccttgaattgaagttgtccattccatattcaacccttgcgtactaaatgtaccacttgcaggactaaaccctttcccactttgaacttccgccaaacctgtcgcaatgctaacagctagttggagagcagtatcataattactactagaagtataattaaattcatatagatgttctagtttttcttgcagtttttgcctcatcacagtaaaaagatttaccatagcttccatacctgggattggcatagcttgactgatggcttccatacttgctttcattcggtcaatttctcgaatttgttctaatatttcttgttcaattacatctgtggaagcgacttgtgattgaaattgacttggaaaagcatcgttctggcgaattaactcttcacacagataaatgattccttgcgctaaaggacgaaaggtttgtacaaaaaatgattttgcactgctataagtttgtccttgtagaacagtatcaattgcaaaggcatcaattgactgaatgacttgttccataccttgaatagtagcgttacatacagcattcatactttgagtttggccttgtacttctcctaaatacatatttaagctcatgcattgacctccctcgctaattgttgttgttgataggaaaggtcgttttctaaatcactaaggtttcgtctttctttaagcaacgtttctttttggttttctaattcaaatgtgacttttcgttcaatatgttgtgcctcttgatatgtattcataaaaaactgagacatttctctatcaccatgccaagttcctaaaattcgatcaaacaaacgatggtttcgacctctccattcataaaaatctgcttccgcttgctcctgaatgtgaatcgcgaattgatttcggtcctgttcttcaaatacatttcgtaacttttgatttacttgattaatttgtttttcaatatcttggctcatctttttcctcctactattttactttacgtaggttgtcacattagcgaaaagtgttgtgaagtgcgttatccattctctcaaattcattagataccgaatgaatattatcaaccgcttgttgaaaggcagcggaaaattgtttcgtcaagtctaaaacttgctgattcgcttcttgtgctttgaagttaacagataatgttgtacgcgtcgcttttgttatagaacgacttgttgcactttgaatcctatcagaggctgatcccattttcgtagcaatttgcgttgctgtttgtaaattactttgaaattgtcccattctttcaaaccctttctataagttttccagacgcaccaaagaaatctcattaaatatatatccctatcaatatcactcgctaggcatgcaatcaaatgagccatacaatataagctgtatggctcatttgaaatacttgttatatagagtaaaacaatttttatttcaaaccgaaattacgtgataattcttcatcatgagaagcaacagcttctgcagttttattaagctgcatattaatttcttgtaatagctgtgcgaagttttgtacttttggctacacgagaagactccttggaagaataaagtattgttgtccttattcccccttttcggggggatgggcaaaaacacccttgtttaagataagaagaaaactgttttgcaacatccatgtgatttcctccgcgtctataaattgtgttgcgtctaaaagtatttatttatcgataaattgtgttgcgttaaacccctagatttatatttattataacacctaatacaacacaattaatattgtgttgtattattttttgtataaaaaaagacactgtatgtgtcttggaataatgatatattttctgattttttaactctgattttcttagcgtggtttttttccgaaatgctggcggtaccccagaaaacagttaagaagcgaagggtagctaaaataatagtgcaaaagagaactttggtttcattactgaagttctcttttttgaaaatatgcattatttcatatttgacaagtacggtttatcgacaatttacgacaaaatctctagtgttattatgctaagatacgacatgctaacattacgttaaaagaatattaaatggatcgagattattttttagttttgtttactttgatacttccagactgaaaggttcgattttaaaataataaattaaaaattagaaattacatagttctattcaaggagaaatgtttatgcatgataaaataaataaacaagaagaaactaaaaaagcgttaatagaatttctaagaatacttattgatgaaattgattttcaaagaagaactcatggtaagttagcggaacaaattgggattagtagtggcttgttatcaaggcgtttatcggggaaaaatcaattcaattttttgagtttaattaagttgttaaatattttatatgaaaatgatgcacttcaaaaacagaaattaatacacaagttttgtttacttaccacaagtaaacaaaacttacgtattgcgatggagtatgcgcatgctaaaggagatttgaatctgttaaaactactcgttgatcaggaaaaaacatcatcccttgcaacaaatagagaatgggcctatgtatatgatttggtatggacaaggggtcaagggactcttctaggtaaagagttacttgaaaagttagagagtagtaaaaagggtagagtaataaagacaactgaaatgaatgctttatatgatgttttgacatgttatattatgtatgatatagaaaaagtaacctcttttttcgaatatattgagatatcgaagccgaaattcactgaaataaaagatgaatttactagaaatatgtataaaattaggatgaaggaggttcatgctgctgcacatttgttggggggagatataaaaacttgtcgcaaattatgtaatgagattatagatacggaagatttgtatgatgttttttcgatacaaaaagcttcagcatattcgtatttagctgagtcatatacctttgattgctttgaaactgcatcaagttatgtgaaaatggctttgcaatatttagatacattgtattttaaaagagcggaagtaagaaaaaaacaaatattaaatacatatgggtttatgcagatggtacagtatttaactagtgagaaaccacttttcaacctaaatgatattaaggtgtttcatcctgctgaacaagctttattagaaacgctaaaaggaaatagagatacggcgataaagattataaaaaatatgaaaaaagagaatggatatctattaccaatagagtattgctatttaggattggcgatgaatgatatagaatacattcataaatctattgagttatttaggtataaaggaggagggttttatagtgaattaccgatttttatattgaaatatttttcggaaaatggtatcatgtataggagtgtagaaaatgaaaaaagtattatgtgtagttaaagttttagttatagttgctgttgtattatgtacagcttacgaaaaaaaagaatcatatcagatttcccaaaaacatgaaaagcctttacttgctaaaatggttaacccaggtggcggagttgggtaattaattatatttatgaatgcgattgtctcaaatgaggcaatcgcattcgctgtttttagggatgtttactaaatttcaaattcgtaatttagtaaaggattgtgatttgattcacaaactatgaaacgataactatattttaattactaattatcaagattttatattaacaaagctaaaaagaagtgttaaaatcagaacaaacgttctacgcatttccacaatttgtaatttagaaaagtcaaaaaaaatcccagttatctaatccgttgataacactgggttttccgaagacttttgatatgtagtttggttagatgtagcagtttttgagaaattatggattgacgataaaacacaatcgttgtaatcttaattttgaaagatgtttattagcatctaaattgtgaactactaacaattacatagttacatgggctgaaaataaaaagagctaccaactcttgatattttcgaccttttaaaacaacgacctgttttagaaaggctgcccacttaatgaagcataacgagatgcaacatcaataatattatactgtttcgtgtatttatacaagatatgtaaatgtatacgtacacgtgagtttaagcaatattattgatgttgtgcggttatccttcttaaaagtggttcttcggattgaagaaaaaggcgtagactaaaacattagtttacgccttttttgtattctgtaagaaacccattggctatatgaaaattttataatgctcacctttatatttgtaattgtttatgtggatagggttgagttaagaaacttgttaagtatgatgaatctagaccctgagaaagtctagatacaaactgaaattttaaagattggagagaagaaccatgagagaaaaagagtttagcaaaggtacacacaggcttaaagtaacaaaagagatggatgttggcactctattaaacagagcgcacaaagttagtacatttgatggcaagaatttagtcgttctcgacaatggcaatctgtacgatcaaacagttagaagagaagttccagtaacaaatatgtttaggtatatcaaatgcgtaagaaatagcgatggtatcatcattgccaagaagaataaaccatgtgctacattgatgcaggttatttttgagagaaaaacaaagaaaaaagtgaagtagtaatacatttgatcgatttaattgtgcaagaaatacagcacacttggggttcatagcttaaggacataattcttgtgtatgttccccatacgttctttgaaaacttgatatagttgctgggggaagggcaaatcatcgcatgccaatctatttcgtgaatctaggagatgcaagacacgaataaacccttagggacaatagtccgcttgaaaatagcaatcgatgttggtctatctgtagcaagcctacagactacttaaagggctgtacacatgacgccatgacggagaaattccaaagcgatatatttgtacaagcattcctttaacgagagggcgtaacgagactaaacgcccctgttacaaatggagatactcctttttcgcatttgtatccgaccgaatatagaccgtttattttttaaaaatcaagaatacaaaatattttttgtagaattaaacagatcaaataggagtaaaaaattatgagtatggaatgccgagaaaggtatattaggcaaatagcaaatattcttacaagcaaaacaaagcatgcaacaggctgcctaattgaaggcaaagatgatgtgtgtttagagtttcaaatagagctaataaacgcattacaagataatgatacacttgcttatcatgtagatttcaccgattatacaagcgaaactgaatgtcttgcagcgttgaaaaaggcacgtaaacaacttagttcaaataagcaagatggaaagacattatttctttctctagcttcctttgaacgtgtagagaagaaaacaatggatgcagtaaaaatattaattggtagccgatcactaggcatacatttactagttagtgcaaataagagattcgtccacttagtaggattaacagaatacttggttacaatgaacaaatcagatgtagtgttttctcagctgtaccgctatagcacacaaaaggtactggcttccctaaaaaatgattcatggggggaagctgatgaatcataaaatcgagaaaatattgagaacaaagagcattcatgtagatttgtttagattggatgaaagatatgatctcggacaaagtatagatgtttgctgtaataaaatgaatgtaattcatacctttaaagtgtttaacatcactttgctaagaggtaatcattggctcgttcatttgcagtaaggttgtagtatagcgctataaaagtagtggggtctcaaatgttcatatgttaatatattaatgtaatgaatataaatggaatggagtgtagagaccatgtttaaaaggtttaagtttttatcagctgtatcggctttatttatatctataacagtactgcttgcagggtgtggaggttcttcagtcccctataaaaagggtgatacttataaaaatagtaaagacaatttcgttactattacagctgacaacgaatggagagttaaagggtatcaaaatcgtgaagcaatttataaggtggagccaacggaatataaagttgattcgtattcagttgtatcaatttctgtaaaagaaaaaataaatggtagagatcctttgcaggttgtaaatgattatgaatattacatacttgcaactacagaaaaaggctttaattctgtgtatattggttcttcgcatccaaatgataccaaatggaaagaaatcaagaaagaattagaaagctctagtgataaagaggatcttttgaaaaaagagtatgagaataataagaagactctaaagaaattcgaaaagacaaattaggacatacaaataactgtaagagcagaatcatattaatggttctgctcttttttattgtcaaaattaagtagggcaatgggaggtaaggggatatgatcagccgagatcaactgttatttccagctatgataacttttatggttttaatgattttgttatttgatgcatcgctatcattcataatgattcttacagaaaagacaatgtagtaatggaaaacgtcaaatcagctgtaaaagatgcttgtttgtggttgttagttttggttttaacaactttaacctggctgggaattgaaaaaatggttattaccatgcttttagactaaatatattttttgtgtgcaaactctttttgcacattttaaatgggggaaagtcatgaatattgttgcaacatttcattttgtaagtggtttaagaagatcgactattatcaaatcggagaatatagagaaagcgagtatatttattaataataagttttttcagggtgttggacatgcaatatttgaagtagagatgcaagaaagtagagatggatttgaaggtattgatggtaaagtagaaaagtttgaagtgtttcgtgatcaagtaatgtttattgattatcaagtgaaataattttatgtaaagagagcagatccctgggggctgctctttttatgttttgagattagcaataaacaaagcatattgagtatcttcaatatgttttgtttgtaattaatcgataaattacaagttgattagaaagtggaggtgttagcatggtaaggcttggtcaagtcgaaaaagctgttgaaatcgtgaaggaagaagtacaggagcaagagaatgtaaacacagctgttgtaggtggaataggaacaggaaaagatttttctgttataatacctaacattctgctagaggaagaaaagaatttagtagtaatagatccaatagatcaaatatcaaatgtgtatacatttaaagaaaaacaaggatatcatattttaacgtataatttagaaaaagaagatattttgcggcagttaaataatgatttaatggcaaaaaaagaagaaaaacttttaattcatgtaatcttccctaatgaattttttggaaatcaagaaatgaatagtcaacgtgttatggaattcttaatggaaataaaagaaatgcaagatataaagtggggacaagaaaaatcattacatcttttccttatggaatatgaagaatatgcatctcctaagtttcatgctatttttcaaacatggtgtggatacagaattagcaccacgttgagcgttcagcatgtactaagattggatgatgttattctagataattgtcattatgtactttataaaagaatacttgatccacaaacagctgaatggattgcagagaagctgaaatatcatcatgtagaatttcactcgaaatttttagtaacaaacttattgtttttaccattgacagcgggtatgttaatggatttacctcttaatttaggaatcttacagaaaaactatagagataatccttatggaaatgattcatggacaaaacttgtagaaacttacaatgctgaggatattttgggcagagcgttatatcctaaagtgtaaaaaaatctaaagataaagatgataaaagagcagctccttaaaggtctgctctttttttatagtcagttgtgtataagagtggaggtaacagatatatttcttcctcctttccccaggtgatatagcgttgttacctctactcttatgtacatctaaaatattttaaacaagattggtactgaaaaagggtagatcctaaagggactgctctttttgttaaacagttgtatataaaagtagagggaggtgtttgtattggtaaaaaaacccctaataacggaatacgagttagctaatttgaagcataattcagagaaagaaaaacaagtggtgttagaaatttatagaatagcttttgaaaattttttagaaaaagagtttactagtaaatttcttactaaaaaaattagagagcaaatgaataaaggatttgatcatttaggaataagcctaatgaattgtaacattatggagaaccgtactagtttcaattttaaggatatgattagaaaaacattttcgaatttcttttgtaggtttttctataatagtgtcgttattaaatggaagtattggaaatatcgcaaagacgtaaaaagaattgtaggtatttgttgggaagatgaaataattgaacttagcatggaagaaattgcagaagaagtaatttataagagtaatgtttacttgaaaataattgatgatctagagaaatcaggattaagagtaagtgtgaaagttgatggtgaaatctttattttacttttaacctgggggaaatggatggagacggacaatgaagaaggttagaaaatgtaaaaagtgccagggcaaaggtttcatgttcggtaaaaattacataataaaagagaattcatttggttatgaaacgcaggagtttggtattaaagtaacctgtactaattgttatgggaaaggtattaaataattgtatgattctaaaaaaatataattggtattcagaaaatagatcctatactaaccgtagcaaacgaggggggaaatcatgaacaaggaagtcacaataaaaattaatgaaaaaggttgggaaatgttcgttcaagttggagagaacttatatgaagagaaaggtatcatgcagaagtttaatgatgctttaaacgtaaaaggcgtgttagacgaagatgctgcatggatgtcagatcctttgtttcaagtacttagtgaaaacttcttttgctatcaggtagcaaatgccttaataaaaagctagtaagagggtgaatgttttgaatgcagcagaaaaagaacgtaggataggtcaactggaagatgaaattggtggtatatggatatctttatttataggatgtattatgtttttggcgttacagtggggaatagaaccaatgatgaaaaatgtactagatagagagggttttccaactactcttgttgatattatttttaattatattattggtgctgctttctggatagggtatatcattggaattataactattttgaagaaaaagaaagaaattaggagatataaaaaagaaaaaaattctccttcaaaaattaatatacaaaaagatgatataaatcagaatcctgtttatgtaattgatcatagcaaggataaaaaaaatcgatatgaaaaaggggatagagatatgatgaagcgagtatttaaccaaaataacaatgtttctactaatttgggtaaacagaacactaataaaacgagaggtaaaggaagtccaatacgttcatacaatgggtctactcattcttctaatagtacggaaagtaatgacattaataatattgttttaggtgttgcattaggaagttcaatttattcttcaggggatgataataattgttcccaatcggattcttcatcgattggtgatagcggcccaagttgtgattaatggtttctgttgaggattaataaaataagagaatgtaaaagaaagagcagatcttaattggctgctcttttttattggtaaagattagctataaacaaagcatattaggtagtaatcagtatgttttgtttgtaattaatctcaaaaggaaaggcaatttaagaaattagggaagtggggatggagatatgaataagaaaaaagcattaattagtttagcgtacgctatggcgctatatagcttagtaggttgttcgaattctactaatacaggtactatggcagcggagaatgaaaaggctgctacaagtgtaaataaagaagttacaaataccgaagaaaattatgaattaggagaaattaagattacaaataaagaacgaaataaggaatcaagaattgaaattctagaagctcatattgttgatgatggtgtaaggggaactgatcctcgaaatacagccttacaagaagtaatcattttacatgataaggtacaagattgtaattatctttatacatatagctccagtagtacgggatcaggttcagcgacaatgaaaaagctagagtgtggtaagaaagagtaaggtgattctatgaagaagctaataaaaatgatatttagtatagagtgtctcatatttgcactgatgatatggtttttcttatggtcttatacatggatgactaatgaagcaaaagaggataaggtaaaatccctacaaacttatgaaaatattaaaatagcagaagagttaattgcaaaggaactaaataaggatattaaaaacattaagttatttgataatagacatggcaaagaactaaataatcaaaaatgggtagaagaggacatgaattgtaatgtcaaaacggatgatggaaagtataaagtgtattttaatgtcaaaaaaataattgataaaaaaacgaatactgaaatgtatgcccctaaaaatattgaaaagttagtaagggagtaacttaaaatggtcaatattattatcatttcaggaattgtttttctaatattagtattgctagttctttatatccattggctaataaattaaagggagagaagaagtatgaaaataaaagaaacagattgtaaatatacgtattgggaagaatcaataaaaatgttttataaaaagcaagaatgggaacgaaaaagacagcaagaaaatcaaggaaaacgagaaggtaagtagcatggattcgcaaacaaagaagaataccagatctaaaatagggttaattaaagtaataagcataattatctttattgttggagggctagtttatataggaattagttgggaggagtatcttgataagagcaataaggcgcatgctataaagatagaacaaacccatgaaaatataaaaatagcagaagggatgattgaaaaagaattaaatattagtagcaaatatttcaaaatgctcggtacacgcactcttttatttttatcagaagatgcagaactaaacaccaatacggatgcatattgggtaagtaaagatataacatgtaaagtacaagttaatggtgagaattatagcgttacttttgaaactcaaaaagtagatagtgaaaatgaagaattagaaatgtatgaaccagtaaaaattaacaagatcataaaggagcagaaatagtatgaaaaaattcttactaggatttgttcttatagggcttgttggttgtgtagatgttgataagccggtaacaggggattctgaagctgtacaagagatttcaagtgagaaagaaggtattaaggtttttgtagataaagagacagggtgtgagtatttatatagaaataaatttgttggaaatgttacatatggtggaatgacaattagactagatgaacagggtaaaccgaaagggtgtaaaaaaatctctgagcaaaattacaactaaatatggagggttacaatgtcagtttatattgaaggaattcatgaggattatacttatggattccttttttactctaaaaataaaagaattgttttggatgatggagttcaagagtacccaatagatgaagcagaagtactcctggaaaaagaattcgtgtttatagatgagttaaggaagcttgatccattaaaagtaccaggattaagagcaaggattaaattacaagtgaattaaatagaaatcaaaagtctatcaaagcctattggtagactttttagttttatttaaacagtaatgaagttggaagggaggagagaatataatgccagtctttcatgtttggtataaaaaaggaataacagatgaagataaattacatcaaattgtcaggtcgaaaaatgaaaataaggcaatattaaaaagtgatgcttataaggagggaaggtgtatagatgatgtgggaatagaaaaatatgagtgccttaaagcggaattcggtatgtctttaagggaggagttattcgagcttggatgggcatttcgatgtgcgaaatgttatcaggtagtaggtgatggcataatattaaccaaagtattccgtggaatattttgtgaatgttgcaaggaacagaatgccaaagaaattgatgagtattcacattttagaaaagttattgatgcaaggctaacttatatatttcgtattagttgtttgctcatcataattgggacgtgcatggctggatatatttatgatgggatttcattaccaggatttgttatgagttatcttttatggtgtacaaactggctgttttattatatttctgttaatcaatcaacgtttgagcctgagagtgacctgaaaaaagattcgattgcaataggcggttttacgtttatccctattgtgataaatttgcttgttactggtgaaattcctaattggttataccttgattggtttaatagccagtggttaaatttaagttcgtttttaatattagctgtaattttaatgataatagcgtatattatcatatttatattctgtgtattagtgcatgaagcgataccttctttaatacgatggttaaaacgacaaagaaagagctattggattgatttaaattatggtgattgggttatttataaaggatgtacttgtcaggtaataagttctaatactttatttcatagtaatagatattctgtaactcttgatgaatggagttaccttagtattgaaagtatcactcgcttagatggttattttatagttgaaaataaaaaaaacataactgtatttatggatgaggatgagattgaaagagtagcaacagaggaagaaattcaacaagaaataaatagaagaagtaaattcaagatatatgagtttaaggaaagatatgggttagaattcacatgtgagcaatatggacctgaactcatagacaatcgattttattcagagggtatcatgtttaataataccaaagttaagagcaaggattaaattacaagtgaattaaatggaaatcaaaagtctatcaaaaatatatggtaggctttttagttttatttaataaggagtggttaagagtgctgaacaaagtaactattgagtttggagaaggaacaaaagcctggaaggatatgcaggatgtaatgactattttaaaagaaaaaggatattctgttgaaccttatgaggaaattggcactgtaaaactaactaaggggattgttgatgagatgtctgaagaagatagaggagcagagtcattagcagcggtataccattctaagtaaattgtcatagcgctatgattcgactgaaaggaggtttatatggaagaaagagcaagaagtccaaccaatccccttctctcatgtgaggatagatcctcatggttgtaaagagaggaggaatacgattgtggtttagaaggtcatttagtttactatttgttgttatgcttctgtttggaagcttggccgactttgtatcaattggacatgcagaaagtacatcggaccagaaacaggctcaagagaaaaaaacggacgatgtgactgtgctgcaagaaaaatctgatctgaagagtacgggaactaatccaagcgaggtagttgtagcaaatggtaaaaaaggtagtgagttgtttgattttgaagcctttattaagccttcagacattgtagatggaacagcaccttttgattcgaatgatgaagcaggtaatgattctagccctaataatggcattgtaaggacgtttgatacagtaacgtacccattgaaagtgacgattaatcctaagaagaatgaaacgttaaaaaatattaagatgaaaatcactggtacattagaaaatggaattacaaacaagcgtgttaatgcaaaatttgctgttggtggtaaagaggatttggaaaagggtattgtttcttttgatatggaatacacgttaaaggaaacaggtaactccttaatgattcctgttacggtggaagtacaaggggcggagcatggattgaaattaaagcctaacattaaaatccaggttataagtgtagatgggaaagatattgcaaatgaaaatgtatcgcaatcatttgatggtattagtcccgttactacttcaggaaaggttaatgtaaaggctcgctttactgcttcttatggtggaatgcctagattggattataaggtttatgatcccaatgcaaaagaggatgatcgtacaatcatatatccagttgctttagatttatttgtaaataatttaccaaaccgaactgatttacgaggagctacattccctgctggaaagattaattatcactttaatttttcaggaaaagtcgattgggattataaatcgttaggtgcagaaacattgaattttgagggtcgggataaaccgataaagatctttaactatcaggctattgataaaatagtagataaagtgccacaagaaggtacggaaagttttgaaattggtatgaagggctataaagatcctcgtactgagacagcaaacagtcctaaatcatatattccaaaagatatatggaatgctagtgatattgataaatacacgattgacagtgtatgggatagtggaacagtacgtttgaataaaccagaaattacaaaggatcgtgtaggttatacgggtagtatagaagactatgtaattggttcaactttcccaacgatgatgtcaaggccaggttattcagtaattcctaccttcggaaagaatgaaaaagcattttcaagcacacgtttcttaatacattcaacaaatgaatattatcctgtactgggtaaaaataataaggataatctaccgaataatgttttttattatttagaatttgttattgattcttatgaggatggcaagggtaatacaattccttataacactgttggaagatacacgcttaccgaaaggaataaccctaaaggtgcatactccatacaaactacattccatacaacagatcataaggagttaggtacaccaaatgttggctatagcgctgtatctaaaggagatccaacagttatagtaggacaaaatgtaaaagtcgttagtcatttgaatgttcgtgctgttacagaaggtggtacaacgatgatttataagtggaatacagattcgttttatctatctaaaaatagtgcggaaacagctaggaagaacatgttaaacgaggggtatcccaacacttctgcgggaagggttacaaatagtgataaacaaaaaatctattttggaatatctaaaaaaggagataattcttttgaaacactaacccaaaacaaagatgaggattatgattggtatagcacatatgatgaagcaaagaaacaaggtgaagtagctgctatcaaaaatgatattaatgcatctatgggggatggtgaggttgtagcatggaatattccattagaggtaaaaacaaagaaaataggtagtgttaatgaaaaaggaacgccaaacataacggttacggattcaatagtgtatccttcagctgatagaaaagtgggttatcgagtacgtggtgaagggaaatataataactttactgagtatgatgaaaagggaaatataacaaaactgcaatctcctgtaggaagtactgtgaattttgaaacgctaggcattatgaatggtgagacgagtagtgatgtgaaaacaaataaaaatacttactacagttcagataatgttagtgtaaccgttgataatttagtaaagttacctgatgcaatggattataattcattagatgaaaaagtagaaatgagagtgaaaataccaaaaggtcttgattatgtggttggttctgctaaatatggtgatcagtatatcgaaccaaaaattgagcaacaaaatgatggaagtaatcatttgatttggcatgacacattgactcgtggtaataaaacgctcaaaaaaatcaactttgagacaagaattaatcctgtactacttccgcaaggaaatcaggtaggtttggaaattacgaatgttcttagtagtgcgatggacacaagggcagaaaaatttaggacaagttctaagaatatttcagttgtgaaaattggtatggttggtgttagtgaaacaattgagaaagtgacagggaaaaagaacagtgactatgtggtcggtgttcaaccgtatacgacaatcaaagatgagtcacatattaaggcacttacatatgttccaagaaataaggatcataatggatctgcttttaatggtgttactttcttgagacaaatagcactagaaaatgctaataataagaacgttgaaatatggcttaataacagctttgttgaatcaaataatccaaacaaaattgatttaaagtcaaatggttggtataggtatacaggagagcaggatctatcaaaagtggtctctattttgctgtatataaatgattcattaagtagcagcgatattgtaaaaatgaatcttgtttacggcacacataaaaatgaatttggagatttttacgtaagtaaaacagtggtaaatacctctgttgattacaaattatctcctgtttctaaccaggtgaaatatacaattgtagcagatgcaaatttaggtcttagaaaaataagaatcgatactgcacctgctgatattggtttgccagtaattgtacgtttagacaaggacatcatttatgaggactctaataagagtaatgttgctgttaacttatatgataagtctgataataagttggtagacagtaaagtatatacaattcaggaattaccggaggaaataaaattcaaggtagatcctaaatttttaaagaaaaataataagagaaactacgaggttagatttgaaaaagtcaataaagaatctatttttatcgtagatgggaaaggaaaagtagatacggatggttatacttcttctgaagaaactgtaaaggcaaatacaaaagcatctactgagttaaaatataaaggcgttataatgacggagcgtgaagtcggaaaagagatggaagtcttttatgaaacacttacaattccgttaaaacagctacctaaacaaaaaactggctatggttttgagttgaaaccattagttagttataacaatgaattagcggtttcttatgatgttaagacaaatgctttagtagataagagattaattgattctcatttgaattatgagaaaaaaggtgatcaatttgttgttcctttagaagaagctgagaaaacaggcagcacggacaaaaagaacactgattatctttttgaattgccacatattaatgtggaacaaaaaacgggtaatttatttacagaccaacaagtaaaagaccatgatccacgtattaagaatgcaataaaggatgggaagcgaaagttatatgttcctatttgggcagatctgggagaatacaacgttttaatagtatcgggaatccctataggcgctaataaagttaactttgaggtaacacaaccattaaatttatatgcatatatgtacgggacaattggctcgaaaaccctggaagatgatgaattactgttagagcctgttgatccaaaaaatcctttctcaaatggcaaaccgcctggttggtcagatgtagatgttgcttggttaaagcaataggaaaggagatgaaaaatgtgtgaatgtcctaacttatcattcggccaagaaacaaattatctttatggcgctatacttcgtaattacaggaatagtaattcgtttaattggatattcgttgcaaggcagcctttctgcttttacacaagctggcatcggaaatttactttcgggaaatttatcattaggtgatatgttccactttgactttagctttgatacgagtcaatttgatggatttagttttaatatgtggattgtttttataaaagacaagattcatagtattataaatgatttattgcctactacattaggagcaattaatatgcttatgatgggcaaatacttaacggtagagcgtgctattaaattaggcattaggttgtattaaaaaataaataattggtagaaaaagagacgtgattttttaattgcgtctcttttttatatacaaaaataaaaattgagaggatgtagtaaatatgttagatcaaaatacggatcgtagttggtggatgattggtgcagtttctgttggtggtgttttgttaggagcaatcctaatcgcttatcctgaaattttacaatcagtaattgatttgtttaagcaaaaactggctgctgcatcaaaataactcttttaaatgtggatgtttaaccattatccaacaaattagggggagtaagctctccctttatttgcttggaaaggagtgaaagaagtgaaagaacatcctttcatcctagtgataatcgttttagggattttcttagtttccataggtggttattactatagagagaattttgctactgattcagtcacacaaggagttacagagacagttcgagcgagtgtaatttcgaatgtagataatagctctcgtgtgcaaagtggagagctgtttattgtaaagagtgattttgaaaaggattttaaaaaacgtattgagtcaaataagcttgtgaaaatcagtaacgatgcaacatatgaatttaagtaccgagataataagaatggctctactaaagcaattcgagccattatccatgacggagatcaaacgtatcaagcaacttataaagtaagtattgcaacatcctagcagaaaggagaattgtatgttagaagcgtttaagaacgtagcagtaaaaaagaaaaaagacagtaaatttaacgattttagctctgtgaattttcaaaaatctttagaaacaataagaaatgatttgaaaaacagtaaagcggaattagttattgatgccatgttaaaagaagaagcaagacaaaaaatcaaagatattattaaagagaaatatgcagctcatttcatggattttccagaagataaattggttgaggtttatgagtatgtggtatctgaaattgttggaacaggtgttatagaaaggttaattaatgaacgtcctgatattactgatatatcatataactcaagtcacttaattgtagaatctagtgattataaagaaattcatagagacactgatcatcaaattacggaacagtatataacacgagtaatacagaaatttgctcatgcagtgggaaaagagtttgctcctaaatcacctatttttgatggtgtttatgactctgtacgtattaatgcggttcatcaccaaaatacaacagggaattctacaatgtcattaaggattgttcgtccgagattggcattacatgaaggaaactttgaaacatttgctcctacgttcatgcttgaattctttagaattctcatggaaacccgaaataacattgtgatttcaggagaaacagggacagggaaaaccgagtttttgaagcttttgttctcatatatccgatttgaacataaggcaattatgattgaagatgttcctgaaacgcatgtaaaaaaactatttcctgataaagatgtgtttagttggttaacgggacatggggttactgttacagatcttatagaagctgcattgcgaaataatccacgctggataatgatttcagaattacgtggtaaagaagcatatgagatgattcaagcggtgttctcaggacatcatattgttacttctttacactctgtagatgcagaaacttctccaaaacgacttgttaatatgtcaaagatgggataccaatttgatgaaaaatctctagaagaggatattttgcgctattttaattttggatgccatattaagcgattggtagtaaaaacaactaaacaagggaatgtacagattaatagagttattcgttatctagcaaaggttgtggaatattcgccagaaggtaacagaatggtatttgaacaaaaatataaaaatggtaaatttacttattcaacaggaaatctatctgatcaattttatgaaaagttagcggaaaatgatatgaattataaacttcctgattttaaggatgaagtagccgttaaaaaggatttaatcattagtagataaaaaatggaaaactccgagaaaggaggtaaaggtttgaaaatctctacttttaatgcaaaaacaagaaaaaagaaatttgtgaatgccgaagaaattaatgcattcaaggtagcatatgggaaacccttaaacaaaaaggattatatgagatatgcagctattccaggtctagttacaggggtattttcttttctcttactttatatatggtggctctcattaattttaggattgatgggggcactatacggattgaaagtgctaatgcctaatattattaaaagggcatatgagcgtgattcatttagggaaagaaataaatttgtcaataatatgacctctctcttatcgaatgaaaatcaaacattattaatctccttaaaacgagcgattaagcgtgcaaatggggagttgagggaagatttaaatatattaatggcaaatattattggggcggatcaaacacaggtgattcatgcttttaaacaactgtccaataaatatcgagaagatattacatttgatcagtatttagaacaacttgaaacatgtgttttagaggggagaacaaacctggagacattgaaagatattaaaactcatcacaatgaaacgaaagaaaaaaaggatgactatgcaagaaagaaagagggccatatgaaagatatgaaaactctttgttttattatagtagtgttcatcttggcaattactgtttcttttggtgttaatacgtatataacagcatttgcaagacaccctattggctgggttacgggtggtatttatatgagtacaatatttttcttctttaaatcctttactgcatactttttcgatgattcgataatggaggtcaaagtatgaagatagtaacagctaaaagtagtaaaaaaaatcgttacaatcgattactggcggaagaagatttatatagcatgttagaagaaatgggaaatacaaaggcaatgattgataaatttcaaaagagacgattgttacaatcatttgttatgtgtattttcggattgctattaggtttgtttctctccagttggtgctacctcatagcaattggtctaccaattttcttgtatcgttctaaatatacacacgttaataaggtatatagtgcttttaaatttgaaagacatttaaatttttctaaattcactagattattaatgccttacttgaaagaggcgggtgaatcagtgagtctatatcaagtttttcgtaaaatacttaatcgtatggaaaagccagtagataaaaattcgttagctaaattaatgtcggaaatgacagacaaaccaaatgatattcagccattcaccgattatgctatgcgttcaagtggtagcgatatgtcaataaactttatgcaacttgtttatgattttcaacaaaattcatcagatacaaacgttattaatgagttaggacaaatagcaagtgctgagttacaaagagcaatcgatgaaattatcgcttttaagttaagacgatttaatttcttccctacgaaaatggtaatgagttctttcatattagtagtagggtttgcagcagcggtattggtatatcacctatcatcaattaatctctcataaataataggggagggtgaaatgaaaatgagtgggtgtaaaatatgttagatggttcaattatgacaattgtaaaatggtttgtagggttaatgttaatcatgctgatggttgcagtaacccttttcggcattcaattgaacgatgtaaattcttataaacaacaggtgaattatcaaatagaacgacatggtggattaacaaaagaatctattcagaatttgaaggaatatagtgatcgtcaatacaaaggagcttttactataaaaagtgagcaactaaataaaaaagttaattacggtgacgttgttgattatcaggtaatagcaaatttgaaaatcatactttttaatttacctgatgtgaagatggaatttcatggatctgcaatctcgcaagtacgctagagagtaggtgtttgagaaatgctagaaaataatacttttcgcttaatagttcttatggggggagtaatcacacttattgcgattataacaatatgtttagatgaaaagcctaatatggaaggtttattccatcattttatttctcaaaaaaacacaaagtattaagtaaaggagtcaattagatatggctaggaaagttggtaaaaatgaaaaaacaccattgcagaatgcagcagcggtgcttttaaagaaacaaggaacgatatatgaggaatggtctcaaaagattgtaagtgacaattgcttatctctacttcaagggggaaatcctgagtggagaaataagatgttagaaggagctgcgatggatctcatcgcagcttctgttgttgaagaggaaaaaaagaacaaaacacaaagtcaatcggatgcacaaccgaaacctaatcatttaactcaaaataatcaatcacataaataagaaagtgggaatttaaaatggatctattcaatatttttgctatcaaattattaacttacaatgatttctttgattctgtaagtaatgcattaacatcttggtctggaaagttacaaggacttggtatagcagttattattttctgtgtatgtattattgctttcatgttcatgttcggcgaagggccaagccgtacagcgaaaaaatggctactttacattgttgttggtggtgttcttttatggggagcaggaactttcgcaagtacagttcaaggcgttacagctggtttctaagaaacacactgaaagagaagcttactaattgtgggcttctcttttgttttaaaaaaattctatatttgaaatgaggttaagagagtgtatattgtagagtttttacaaaaagaacaatcaaaagctttcaaaaagtttttaaggaagaataaagcagggaacggaaaacaactagggttaaaggcagcagaagagttaattcaaagatatattgaacaaaatcaacaatctgatcaagtgctactgttattgcaagatgttgagaatgaaaaggcatatgaatttgaattaccggtacaagtaggaagtgaattttctttactcaatgctatttcaaaagaccttgaaaaaggaacagattataacttaggaatggaaatcaaacaaggtatatatgaaagttacagagctgaagaaggtggagcagttatagaacatgaggaaggagcacctaaaaagaaaaaaggtggcttgttcgctaaattgtttggaaaaaaggaagaagtaccacatggtgataatgaagtgaaaaaagagtttgcaggtgtagaggaaaatccttttgaagaaatgcctatgcatgaattgaaaagtaggggaacacatcattttgaggatgaagatattcaggggctacaagaacacgctgctgctttagatgaaaaagaagatgatgatccatttacaattgaagaagaagaacaagatgaattacccgcaggagtgaacttggaaaaagtggctgaagaactaccatttcctacaaatgaagttgattcagttcaaagtatagaagaagagctatttagtaacggttcagacgttcagaaaacaaatcaagagcctgtaattgaagctcagaaccaaggtgtaacattccctgattatgaagaatatctgaaccttagtgaagttgagacaaagcaagaaagatatgattcacgatttactatcaagcacttactaagtcggtttggtatgagtgaggaagcaactacagggcttgaaaagaaaaaaatgcaatatgtaaaaaacgtgttaagtggaaaagattttttgctgattcaagataaatattaccaagaagtaaataatttgagagatgaaatccgtttggctcttgaaaatatttataaagaagtcatgatgcgtgattatcaaaaagaagctgaagaaaggctgcaagacatttttgaacaaggtttccaaacaaggttagcagagttaaatgagtttgagaacaaagaaatgcaagaaatgcaaaaaaaattatctgtatttactgaaaaacaaagattagcattagagtcttttaaattgcagcaagaagcagaatttacggcatatcaaacagaattagaagggcgtaagaatacgttagtaagtgcgtgtgaagaagaattaaagaaagaaaatgaaattgaaaagagaaaagcaactttagagaaagtgtatgagttgaaagtagaaggcaaaaaagaactgatcaataaaaagaacgagtatttatctgattctatagaaatgacagaacagattatgaacgctgccaatgaacaacaagaagtggggtttgcggttttagaggataaaatgaagcagttaatccctgaatggaaagaagaaattcaagcagagcacgataaagaaatgaaagaacgtcaattaaaaatagaagaagaaaagaacagaattgaagtagaagcactaaacttacaacaaagaaaagaggaagcgaaagaggtaaggagcaccgatagagaacagaagctattgaatatcatagaagatttaaaagaaaagttattaaaagctcatgctaacccagaacaacagccactacaacaaccagtgatgatgtatccgcaacctgtacaacagccagtatatatgtatcaacagccagtacaacaagctccaatacagccacaacaacctgtaatgcaacaacaaacaaaaacgtctacaaaaaaacggagaacatttttagctagactaatggactctgagtaagtggttaataaggagggaatgcgaaaatgacactattaaaattcaagcggaataagtaccttcatcataattacaatattgatggtgaagacctgccacaagaaaagaataggataaataaaaaagcactcgcaatttcttcacttgcggtgctttttcctttaggtggactaaattttgtagcaggtacgtactacgccattgtaaatgaattatcaaaaacggttgaaaagccaactatttttgatgtatttggtacggattgggagaaaggtatttcaattaaaaatgtttttcttcctgttctgcctacaaatatgtacttgtttggcttattagcttctacggtgatgggttttttggtgtattcaaaggttaattatcgaagtgacgaaaatgtagcttatggtcaaaagggggatagccgttttactacaattgaagaaattcaagaacagtatagagaaattcccgaaaagacggaaatgtttgaggggtatggcggtgttcctgtatcacattataagaacaaatattatgtcgatacagatacagtcaatacagcaatactaggggtttctcgttcaggtaaaggggaaacgattgtcgtaccaatgattgataatttgagtagagcaaaaaatcaatcaagtatggttgtaaatgatccgaaaggaggcgcgacacgttcctaagtgaaaagcttaggcactgtcgaactcaacagttcagcagtgaactgtcattttgagaagtcaaatgaaggagtaacgtctggaagggcttcccttaatcctccgacatgcaggaaagtaagcaagtactgaactgtgtgaagctcggtgaagtcggttgaaggttaccgtaaattagtatctctaatacgaaagctattcagcggtggatggtgtaactgatagaccggaggtctataaaacactcaaggttaggatgcgcgatgaactagaggcgatcgctagtaagcgcagacgaatccctgatggtacgggtctatatcgggagggaatcgaaaggttctctgacacaaataagtgtcgctactgtgggtgagtaaaactctcctttatgaaagcccatatatcgttacaggcgttattaaggtagcaggctcataggggaaacctaaaagtgtatgtacagataagaatgacggaacgtggtaagctgccgacatggagggcttgttctctttgaagtgttgccaaggaaagtcacaatgagattagttgtcgatataacttggtttaacggcagtgaaagtggtggcacagtaccgatgaaacgtgtaatgaacgtggagggatagccactagtcgattgaagattgaaggttactattggttaacatggtttcgagtaagactaagagatgtaatgctccaaagtaataaggaggttacagcccatgttaaagaaaaccaagctaagacataacgaatattatgatacacaaaaaaaagtgtatgacaatttatactcgaacagtcttaacggtaacaatttctttcaattggaaacgatggaacgccgtatgcccggaaacgggcgcgtacggtgtgaagtgggggaaaagctggagataatctcaaaggcttacctatcactataattgtatagtgcatctaaagagacattagaaaaacgtgggtatgatgttcaagttttgaatatctcagaacccttacaaggaatgtcgtataacccgttacagttagtcattgatgcatgggtgaatggcgatgaccaagaagcggctaaacgagcgaatacattaacattctctctttataacaacccaaatgctggtgataatgcattctttaatacatctgcacaaaatgcgattaacggtattattctcgctatcgtggactattgtgtgaagaataactgtattgaaaagattacaatgcacaatgtatctcaaatgctaaatgaattaggtactttttattataaagagaagcctgatgattttaccgaaaagagcgcattagatgaatattttaagagtctaccgcaaggtaatgtcgcaaagatgcagtatggatcaactagctttgcaggagaaaaagcaaaggggtctattctagcaacagccaatcaagggttacaaacttttgcggataaaatgtttgcaaaaatgacttcgaaatcaagcttggatttaaaacaagtaggttttcctaaaaatctattttttcagttggatgaacgatttttgaataagcgtgtaacggtatcttttcataagaataaccaagaaaaaacggaaattttaagctatgaaattaaggtgaaagccttaggtatgtgcaacatgaactttgatgaatccctagaagatggggatttattactaattcgttatcaagatgtagaaaaccaaaaaaagaagtacagattattttatagcttacagtttgaaaaactgctagatgaaaaggggcaagttgtttatcaaaagaaagagggatgcgaacataaacctgagtatcagcgtcaagtcacactgattttaaaagctaatacttttcctttacaaccgaaagcgaagttatcgtattccaataagcctacagctgtatttatgatcgtccccgactacgataagtcgaatcacgcactagcaagtatttttgttaagcagctgtatacagagctatcgatgaattgtaatgatacaaagggtaaaaagtgttataggcgtgtccatttcttactagatgagtttggtaatatgccacctattgatgatatgggtggggtattaacggtttgtgctgggcgtaatatgctgtttaatttggtgcttcagtcatactcgcaaattgagaaactatatgataagcaagcgaaagaaatcaaacaaaactgtcaaaatcatctttatattatgtcgacagatcctgaaacaattgaagaaatttcaaaacgtgctggacatgaaactattattggaaaatcttccaatgaaagtcacttggatacagataacaaggtaacgaaaagtgcagaccaacaacgtatcatctctccagatagattatcacaatttcttgagggagaaactttagttattcgtgcattgcatagacaagatttaaataggaaaaaagtgcgaccatatccgatttttaatacacaaggaatgacaatgccttttcgttggcaatttctatcgagcttgtttgatacttcaaatgatttaaatgatattgatattccttccttacatacaggattagatttaacagagctatacctaaacttcttggattttatattaaatccagttgcgaaaaaggaatatattaaaaagcaacaagctaatcctgtagtgaaaaaagagcaaacagatattaatgaagcgattaaatcgctcattggtcttgtgaaagagaaaagaaatagaaacgacactgaagatattcagaaacgacttgtacaaatgctattagattatgcaaaacataccatcgttccaaagacggaagaagtgaagtttttaaaagaacattcttcagatgatgaaatcaagatgtatttagaaaaaatattggacatgttggtagagtaattgatttgaaatcaagcagaaaggtagaaaagtaatggctactatgaaaataaaagaatggatgttacgtagtaaaaaatctttagttctagggattttagcagtcgcaatgctatttggaagtttcacgttcacaccgattgcgtatgcttttgattggtacaaatttcttggtctgaaagatgtggatacagaaaaagcaattgtctttttaaaaaatgagtggatacaatatgctgattttttaggttctatttggcaaacaattcaaggagggataataaagacattactctatatcgtatcagcgctagaaggactaattcctgacactttttctttttttgatgtgctaaaagatgcaggattaaatgactttgcatcatctattataaagggtttattctatgccttattcgtattagttgtcgtatggttagggattagaacaattattcagcataagcccccacgttttaaatcagtaggagttaacattattgtaatgattggcttactaggtggattaaatgagttgatggcggatatgcagaagatatccactgatttcttttcggaaacgacaaacactagtaaaacaaaagatggattggcttgggatttagtcaagcagaatacagctgatctgatttatttaagtaaaacaggattcgatccaatacgagggaaaaaggaaaatgaaccagcaatttcatctacagataataaaccgaaaaatggaatgggaaaggaagtcttccttcaagcaaatttgggggatatagtgacaccagagtctatagaagatttatcaaagcaggatggaattcctgaagaaacgaaatttttatcttataaaattacaaatgatggggataaagaagtaatagaagaaataaagaatagtgtgtttaatccatttaaggataaatttccagggggctatgttcgttatccaatgaacttcgggactatatttttggggttattagctctaggagttgcttatttatttacagttttcgtatttgtgatgacgatatttgaaattgccatgaagaaaattattgcgccaattgtattcgttacagatattgaaacgggcgaaaaaacaaaaatggtaatgcaggatatctttaaagggttcttaatatttgcctttacaggtttaaatttaagattctatacaattatcgttaactatttagcagagaaaaacatcaatgcgtttttatatatcgtagcaatggtttgtttaactgtcgcattaattaaaggatcagaatctattttaaaatactttggtgttgatgttggattaaaagaaggaaagaatcacttaatgggtatggttggcggagctatggcagcgaaaggagctgtgaagggcgttggtcgtatgtttagtggtgcgaagaacctaatgagtggtggaagtggacaaacacgagaggatacgcctaaacgctctgaaatggactcgaatcatgagagtgctgatctacatggagaacaaaagaataatgctaaaggcggcggtatgcaagcgaagaaatttgctagaaatacgggcgctgcgttgagttatgctactaatcgtggagttggcggcatgatgaatgatgcaggaaataaagtggctgagactgttggtggcgctgttgataaagggaaagaaaaagtatcaggcgttgcgaaaggcgtatcggacggtgtgaaaggtactgtaagtgaatttaagagtggtcaagagcaaggtaaagaaaaggcacaagaaaatgctgatcgtcaaacactaaatacaataggtaaaggtattcaaaataatgcaaatgcaggtatagagccatctgctagccctaagatggctaatcgttcgaatgtagcttctatttcaaatgaagggcagcaaggcaatgtaaaaggcgaaagacaaacagcggaacgagaaatcgaattacaaaacaaactaagaaatacaggaagagaagaatcacagcaaggcaatgtaaaaggcgaaagacaaacagcagaacgagaaatcgaattacaaaacaaactaagaaatacaggaagagaagaatcacagcaaggcaatgtaaaaggcgaaagacaaacagcagaacgagaaatcgaattacaaaacaaactaagaaatacaggaagagaagaatcacagcaaggcaatgtgaaaggcgaaagacaaacagcagaacgagaaatcgaattacaaaacaaactaagaaatacaggaagagaagaaggacagcaaggcaatgtgaaaggcgaaagacagacagcagaacgagaaatcgaattacaaaacaaactaagaaatacaggaagagaagaaggacagcaaggcaatgtaaaaggcgaaagacaaatagcagagcgagagattgagctacaaaataaattaagaaataccggaggtactgaagcatcgcaaggaaatataaaatcagggacacaaacagtacagcgtgatgtgaacgttcaagatacattaagaaatacaggtggaacaggaacaatcaatagtgatgcaaaagcaggtgtagcaacagtacaacgtgatgtaaatgtacaaaacaatgtaagaggaagtgaagcggtaaataacgatgtaaaagcaggctcaaccacggtacaacgagatgtgaatgtacaaaacaatataagaggaaatgaagcggtagagcatactgcaagggcaggagcagcaacagtacaacgtgatgtaaatgtacaaaacaatgtaagaggaagtgaagcggtaaataacgatgtaaaagcaggctcaaccacggtacaacgagatgtgaatgtacaaaacaatataagaggaaatgaagcggtagagcatactgcaagggcaggagcagcaacagtacaacgagatgtaaatgtacaaaataatgtaagaggaaatgaagcggtagagcatactgcaagggcaggagcagcaacagtacagcgagatgtaaatgtacaagataatgtagtagaaagaacaaaatcaggattaagacaaagaggaagtaaacataatcggacagatcaattacgtagaaaatgagattaggagggttagctgtgaaagtaattgatattgcgaatcaaagaagaatttactttgagatgaaacagcgagaatcacaggcgagtatcttaataataatagcgggattgtttgctgccgtcgctataatggtttttcaaataagttttgaattagatcatttatatcattacattgttattttttcctttctaacttatttttctctccatctgtactcgaaaaacaagtcatcaaaaaatagagagaaagcaaaagggattttaagatgaataactggatatttgctatcttgatgttaggagttgcgattgtgttaagcatgatcgcaactttttttaaacagatttttagagtgctaaggcgaaagaagaaaaaagatcctaagttggttacagtaatgaacgctgagtatgtaaatcaagatttttttggggggaattttaatgaaagagtttctaatagaaatactaaataatcaatttgtaatgcaaattatctttacaacaacactttcatttgtagtatatatgatatgttttattgcctataatggagggttttggagagatatgcaattagatgcttcagagcatatctttcttgagcttgatcctttactgcgcattatagtaaaacctgccttattaagttggctaatatatgacaagccctttattaagcaatggtttttatggtctttagatcatactttagtgaaatggattattgggattttatttgtattaattgtgggggtatggattttacaaatagcaatgtgggtatattgctttgtaagagaaactatttacgcaattatacgttggaaaagaaaacaaaggatagcatttacaacacaggaagaagaaatatttgatttttgtgtagacaaatttccgagttatacagaaaaatatttagctaatgaattaactgattctgtagaagcaaaggagataatttataagtcatttttatgcttgcacattttgaatcctaaaggtttgcgtaattattatggtttgcgtgtttatgaatatgatattaaagattatcctgaggaacatccagttaaacaatattatgctaagtttgaaaagtatccactttttataaaggaacgtatggaaaacgatagtaaaatgtttaaaactatgaacctatatattaaaagtacgataagagagtataagtcttgtaacaataagggggaaaaataaaatttataacgtaataaggggagtgttgagtaatggaaatgatgcgtaatcctaagaatacaaagcaagaaattaagttagccttcttttatatcatggatggagcaatcatagttctaatgttagtactagcaagttatatgtcgaagcttgttccagtcggaggacttggaaggataatgttttatgtgctgtttggggcgtttggggtgttcttatgtattaaacctcataacagtcctacaaatagaaatatatttgtgattttggatatgttgaagatggacaataaaaactatcatccaattgaagtaaataccataagcagcgaaacaaaaaagaaataggaatgaaaggagagtgcagatatagcgctctccttttttatatctcatgaaaggaaagatgaagatgaaagttgcgacagttgaatctaaaaaagtaaaccgaaagagacaagttgagtcagagaaaagtaatggaaaacaaagttttatttcaacgatctttgcttcttttaaaaatacggatgcatcaattgttgatgttgcaccttataaacgactggaacaaaaaaaggggatcttagtagatcgtagagacaacttgcaggtgtatttaaaggtaaagactacggacttaatttctatgaacaaagatgatttaaatcgatttatgaatcagttaactagtttatgtcgtgtgtatcatgagccattcaagattttgtctctaacgtactctacagaaacaacagaacaacaggtgtactggaagcgcatggcgctacgttatcaagggaaaatgagtcaagatgtgtcagagagaaacgaagaacacttatggtctcaacgctatagtttagcaattgaaaatttaaatcgggtactgtgggtagaaaagaatttaaaggaattggctttcttcattgttgtgtatgcaaaaaatgaaacagagttagtaaagaatgtgaaggacatgaagcgctatggtggacgtcaatttaacttgcagaatatgaaagcaaaagaagttgagaagctaatctttaagctacaaaacatgaattcagaaatgtaaaaggaggaaatgaataatggtaaagttggggaaaaaagaacaccgaaaatatcgtactgaaggatatgatttagattttatttcgagggtgcagccgcaaggtggcattaaatttaatgagaagtacatagcgcaaggtgattgctatgttgcatgtttacatgtgtactatctagctgaagatattcctccgctatggctaacggcactcatgaacaataaagataccgtttcaagtgtagacatagcgacagcgaataaagaagaagtagtaaaagacattaaccgttctattactgaattaaaagaccgtatgacatcagaacgtcgttctactgatcgtgacgatgctcattgggaactacaaaatttaacagactttgctcgttctattacgcagcaaggtgaaattgttaaactcataaagttgcgtatcttcatatatgatccagtgctagaacaattggagaaaagaattggtgatattaagaaagaaattgcggggcagaactataaagcgcaagtgtatgtttttaaacaaaaagaagagtggcaaacattgtttgcaagctatgacgatcaaatagaatacttgggagtgaaaagtggctatccattaccttcacaaaatattggtttcggtattccatttcatcatcaagatttaaaagatccaagaggaatttatctaggacaaactactacaggtggcgcatttattttagatccgtttttctctacaagtactagaacatcatttagtggtttcatctttggtaagatgggtgctggtaaatcaacactacttaaacaaatcgaagaaggattggttgcgaaagattgcttcattcgtggttttgataaagcaagagattattacacaattgtgcagcagcaaggcggtaaaataattgatttaagtggggttcaagattcggaagaagtagaaacaggaatgataaaccccttagaagtattcgcaacgaaaattacaaatacaggtgcagttgatgagaaaggttcattcattcaacatatttctaaagtcacgaatatggttcgatttttaaattcagaatttgatgatacggtgattcaagagtttcgtaaacatttgtatgctttctatattgagtggggacttgtacctcaaaagggaagtgatcgcccgtacaaagtaacgggattccctcctaatcactatccaattttagaagatttttataaatatttaagtgagctgaagctagaagcgggagcaacaccacaacgtctccgtgatttagaagcaatcaaattgcaggtggaggacatgattacggtgtacggtgatatgtttaacggtcatacaacacttaaaaactttgaaaatgagcagattgttttctttgatattgatgggatttcaaaatacgataaatcagtttttaactgtcaattgtttaccgcattaacattgatttggagtcatgcgcttaaaaatggtcgtcaaatgaagtatttacgagaagaaaaaaacttatcaatagaagacgttaagtatttcatggttttccttgatgagtgtcataacattatcaattcgcaaaatgaatttgccaatcgttatgtattagagttcgaacgtgagatgcgaaaattctttgcaggtatattttttgcgacacaatccccacaagaaatgttaccaccaccaggaagtacagtggatgtgtctacgatgaaagccatctttgaattaactcaatacaaaatattcttgaacatggataactccgtgttagagactttaaaaagtgttctaggtgagagtttaacagaatcggagtttcgtatcttacctgagttgaaacgaggggaagcaattgtacaggtaagttctactgaaacatataacgtgatgtttgatcctgacgagaaacaattagaacgctttaaaggtggtcagtaaaatggcagcgacgcaagaaacagcaatagacaagtataagaaagtgaaaagaataaaatggctcgttcgcttgttaggtggttctacaggagtaataattgcggcagccattacgattcttttaattgttagtatggcgattttgggtggagaaagctctacaggtacaccgaatggtggcataagtgggaatgcttcagtgcagaatttaccacctgaagtcatgaggtggcaatcgatggtggagcaggaatgtgcagcgcaaggtgtaccagagctagttccatatgtactagcaattattatggtagagagcaatggtatttcagaaaaactacctgatattatgcagtcttcaggcgcgacacgtttctctataagcgtttagacgtgaagtgagagtgttgctgaaatttatcttaagcaacaataactaagaaatatatgacgtattataatcattatagatatcaatggaatttaaaaaagatgactcctgttggatacagaaaccatcttcttgatgttgcctaacttttttcaaaatgtcctttacaaagggtacagattaataagagcgcctcttttttatttttcacgtttttctttaattgctactgtacatcttgatatacatagtaaatcatcattttcatcaataatgcgaacatcccaaaccattgtcgattgtcctctatgtattggtgttccaatcgctgttacaattccatctttctttgagcgaatgtggttcgcattaatttctaatccgaaacaaatacatttttcttgatcaattaaattatatgaaccaacacttgccactgtttctgctaatgcaaccgatgcaccaccatgtaaaaatccaaatggctgatgcgtacgctcatcaacaggcatcgtagcaaccaccttatcttctgtcatctctaacaactcaattccaagtgaatccattaaagtttttgccatatcgcttcccccttctcttactttaattaaatgtataattttacctatttattttcaaactacttataacacttatataaggaggcttcacctaaatgaaacagaaattttgtatattactgcttatgttctccttgctgactattgtaccaaattgtgcaataacagccaaagcatctaacctgacaatcgatgttaagactgtaacgcaaaaaggtaagaaaccttatatagaatatcaaataaacaggccttattttcacgaattttctgactctaaatttcaaaataaactcaatttatactacaaaaaatccactgacaaatttaaaaccaaattagaaaaagaagcaaaaaaatattataaagagacagaaggatctagtacaccatttcatccgtacgtagcaaatgttgattataaagtctctttaaacaaaccaccttttcttagcctatatgtgaattactatcaatatactggtggagcacacggtctttatacgtggaaggcaaatacattcgatttaaacgaaaaaaaggtactgcacttagacgatttatttcaacaaaaggataaatataaagatgtaatccgtgcggagattgtacgacaaattaaacaaaatgaaagcatttattttcctgatgcaactgaaaaagtaatgagtatgaaaaaattccacttctttttagagccagacaatctcgtcatttatttccctttatatgagattgctccctattcaagtggaattccgcaatttcgtattccatatacgttgctaagagactatttaaagccttcttatcaaaatattttgattgacaacaagtaaatattttcgctacgataatgttaacctaaaaacaacaggaggttaacattatgagaagatttcatgttttagatttagcattagctgccatgttcgttgctcttatggcaatcggtgcaaatattgtatcttgggcaccattccttcaagtagcaggcatcccattatctatgcaaccatttttcgcaattttagcaggtcttcttcttggaagtagacttggtgccttatccatgactgtatatatgctcgttggcgtagccggcgcaccaatcttcgctaacttcaaagctggatttggagcacttttagatcctactggtggttttattatcgcatttattatcgttgcttacgtatccggaaaactagtagaacaaaaagaaagaccaacattcattacatttgcaattgcctctttcacaggaattattttaacttatataatcggtactacttacatgtacggggcagtcaatctctttatgggcggtaatatgagctataaagctgcttggatgattatgatgtggtttgcagtaaaagatattgcatttacaattatcggtgctattatcgcacctcgcatatattatgctgtgcgtcgttctgcttatcagcattctcattcgacgatttcataataaaaaaatgagttatttcagtatactgaaataactcattttttattatgactcttgattcgcttgttcttctaaaattttcttcatcattgcaaccatgtcatcacgtaattctgggtgttgcagggccatttcaattgtcgtttgaacgaatcctagcttttcacctacgtcgtagcgctttccttcgaaatcgtaggcaaatacacgttggatttcatttaagctttggattgcatctgttaactgaatttcaccaccagcaccgacatgttgctgttctaagaacataaagatttcaggcgttaaaatgtagcgccccataatcgctaagtttgaaggagctgtaccttgtgctggtttttcaacgaaattgcgaacttggtaacgacgaccttcttgttctaatggatcgataattccatagcgatgtgtttccgactccggaacagtttgtacaccaataacagaagaaagtgttttttcatactcatccattaattgacgtaaacacggtttctcagcttggacaatatcatcacctagtaacactgcaaatggctcatcaccaatgaatttacgtgcacaccaaacagcatgtcctagtcccttcggctctttttgacggatgtaatgaatatctaccatttttgaagaagcttgtactttttcaagcaactcatattttttcttctctaataagttttgttctagttcaaatgcgttatcaaaatgatcttcgatagagcgctttgttttaccagtaacaataataatatcttcgattcccgatttcactgcttcttctacaatgtattgaatcgttggtttatctactatcggtaacatttctttcggcattgctttcgttgctggtaaaaaacgtgttcctaatccagctgctgggattatcgcttttcttacttttttcatcacaaaataccctctctcctgtcggaatcaatagcaagcatttcctacataaaacaaaagggagatttcgctcccttttgttccttactacttaaaattactttgtattataaacgattcataatgtcttctttaatagtaagtaacttttgttcactattttgtaaagaactatcttttacaccaaagtaaaacttaatcttcggctcagttccagatgggcgtaggcagaaccatgaaccatcctctaattgatattttaacacatttgatttcggtaagtgaatctcttctttatgtccatcttgtaaagatgtaacgatgcttgctttatagtcttccactgctacgactgttaagcccgctacttctttcggcggattctcacggaacgttgccatcatctcttggattttttccgctccatcttttccttttaacgttaacgatacaaggtcttcacggaagaagccgtatttctcaaatacttctaatagaccgtcatataacgttttcccttgtgatttgtagtatgcagctacttcacatgcaaatagaacagattgtactgcatctttatcacggcagaatgggcggattaaataaccatagctttcctcataaccgaattggaattcatattgtccgctttcttcatactgtctaattttctcaccgataaatttaaatccagttaacgtatcaactgtatctaaaccgtatgcttttgcaattgtacgaccaatttcagacgttacgattgtttttaatacgacaccgttctctggaagcgttccgttttctttcttttgagatagtaagtaatcaagcattaatgcacctgtttggtttccggttaatacttggaactcaccattatgattacgcactgctacaccaagacggtctgcgtcaggatcagttgcgattaatacatctgcgcctaccttttcaccgtcacgaattgcatactcaaacgctgcgtgctcctctgggttcggtgattttactgtagagaagtttggatctggtaactcttgttcttttacaactgttacatctgtaaatccaacttcttttaaaccacggcgtacagaaatatttgatgttccgtgtaatggtgtaaagacgatttttaagtctttaccaaccttttgtaccatttctttattaatgatgacattgttcaattctgcagcatatgcatcatctacttcttgtccaataatatgtaataaaccgtcagcttttaattgctctacatcagcgacttcaactgttaattcatcttctactgcatttacgtagctaattaactcatctgcttcttttggaggtaactgtccaccatcttcaccgtatactttgtatccgttatattcaggtggattatggcttgccgtaagaacgattccacttactgtatgtaaatgacgaactgcgaaagaaagtactggcgttggacgtaagctttcaaacacatatgttgtgataccgcgtgcaccaagtgtagcagcaacttccattgcaaactcaggtgatttatgacgagaatcataggctacaacaacaccgcgttttttcgcttcctcacctaacttttcgataaagcttgctaatccttttgttgctttacgaactgtatatacatttaaacggttcgtaccagcaccaagttcaccacgcataccacctgtgccaaactctagatttttataaaagctatcctcgattttcttctcatcttgcttcatattttctagctgttcttttaattctgcatctaattgtgcgtaagaaagccagcgactaaattcttgtttccaattcattcttctctctcctctcgctcgtcatacctttattatatgaaaaaaacatgctgtatctcaatattttataaaatctaacaggattttactaggaatatttgtatacactattgttaaatactccactaaagggaatgaggattatgcacgaatggggcttgtcagaagagctcaaaatacaaacaaagcaaatgattgaaattgctgaaaaagaactatcgattatgaggaacgcaatcgataaagaagacgaatgtattttatgcaaaatggaagatattcatcatatgttagcaaatgtacaaacattggcagctacatactatattcaggcatatttatcaccttatacggaaagttcatcttttattacgacagctatccaacatttaagcgccagaaaacatggtgctcttatcgtcgtggaacgaaacgagacgcttgaagctctcattcaaactggaacgacattaaacgctcatttaactgcgccattactcgaatcaatattttatccaggtaaccctcttcatgacggtgccgttctcgtaaaaaataatcatattgtctcagctgctaatattcttcctttaacgaaaagtacagaagttgatcctgagctaggaacacgtcacagagctgcaattggcttatctgaaaagagtgatgcacttatattagttgtctctgaagaaacgggccgtacttcttttgctttaaatggggttttgtatacgatttctttataaagtgaaactttaatcagccctcaccaatcgagcgtttaccggcaatccgacctaactgctttcctttcgctgaattttgagttatgggtcttactacccggcaaatagtgggataaacaaacctataaaaaagaagactgttccaaaatatcggaacagtcttcacttatactcttattcttctccaaaacgctccacaagtgttgcaagtgtacgtaccattgcgccagttgctccagctggacctaagtcgtgcgcaccttttgtttctgatgttccagcgatatctaagtgtacccatggtgtatcttcagcgaattcgcctaagaatgtacctgccataaccgcatgtccttcacggcctggtgagttatttaaatcagcaaacttactgtttctcacacgttctttatcacgatcaaaaatcggtagttgccaaattggctcatctgtttccatagaagcctctagcacttgctcaaataactcttcattatttgtcattgcgcctgtcgtatagtttccaagtgcaacaattacaccgcctgttaatgttgcaacatcaacaaggtagtttgcaccaagttttttcgcatacgtaataccgtcagctaaagctagacgaccttctgcatccgtatttaatacttcaattgtttttccgctcatagatgtgattacatcgtctggcttaaatgccgtaccacttacaacgttatcagttgaaggaataacagcgatcacattttgttctgggcgaagttcaccgataatttccatcgcacctaatacagcagctgcaccgcccatatcacctttcataccaaccatgccttcacgtggttttaaagaataaccaccagtatcgtatgtaataccttttccaacgaacccaatgacatctgtccactcttcttttcctttataaataagagcaatcatttttggtggctctacactaccttggtttactgcaagtaacgcacccataccaaggtcttccatctcttctttctcaagaactttatagtccatatcatatttctccgctaattcaacagcatactcagcaagctttgtcgctgttaatacgtttggcggcatatttacaagtgtacgagctgaatttgttgcacgtccatgtacgtagccaactgttaatgctgcttcaatttcttgtgcatcttccgctgtaatagccgtgaacttctctaactctacacgatcctttttatctgatttatacgtttgtaactcatatgtaccaaggccttgtacctctgccgcaatatgagcgacatcaatcgcgtctaatttctctgttacgaaagaatcaagtaagattgctgcatctcgtacttttgctgcttgcagtgttttaaacgccttaccaagagccgcacgtaacgtttctgtcgtgtaagattctttctttcctaaaccaacaaagtaataacgtttcacatttattttccctaagctatgtactttcgaaatggcctttttcttcgtagataattctttctcttctagtaaaacttgtaattgcccttcaaacgctttgtccagttcttgtacaaaactactcattttctcttcttcaaataaagcaacaattaccgcttcatgacctgctaattctttttgtacttgaaacatgttcagaccccctaaatttctctaccaccattataactttattttcgataaaatgcgataattctaactacagttatatggcgtgtaaaatcgcagatccaaaatctcctctatcatgaaataagccaagaaaaaaagtctagcgtaattacgactagactatctttgttttaaatattgaccacgaaacacttgcatcgtttcgtcttgatttaacatcgttaactcttcttctgtaaatttaccatttcctacttttactacgtacacatttacttttttcttaccccattggctataaacatctttcaccgtatcataatatagatcaagacggtttccttttattgcaccgcccttatcagctactacaccatacccgtaacctggcacgaagagaatcgttccaatcgggaatacgcgtaagtccgcagcaattgtggaatataaatcccttttcactttgacacctgaatatgtaataccatactctggatgccctggcctcttaccagttgactcaatccccgatgtataacctgttgcagtcatttcaattgaacgatatttagaccagtcgtttgcctgctctaaagcatttatcacttctttactcggagcaacatttctcttaacttctgctgcatgtacttcttttgcactcattccttcatatatctttacaatctctaataaagaaactcctgtgaaagcattccatgttacgcataatgcaattgcaagtaaacaagtcatcataatgcgaatacaatatcgttttaacatttttatattccacactccttcatcgttaatcattccctatacgatgaaggaatatgcaaaaaaataatctccaacttaattggagattaaaacatttgatatccgcttttccgaagtttcttgattacgactcctgctaaagcagcccctactaatccagtagatagaataaatacgtctgcttgtcctaagtgcgatacacttgtcccaaatgaagaaaatgtttctttcggttttgaaaaataatcccacatactcgctttattaataataagcatacaaacaatcggatacacaataaccattacccaagtagctcgcaaaatcatgttgagtaaaaatccaattccaaagaacaaaataaagaataacatcattgaaataagtagtaccggtatactcactcttttcccctctccttcgcacgtgccgtaaatacgtgataagctgtataaccaaatggttcacctggatttaatgttttgtccacttcaagatgtagttctgatcttccttctaacaaatatttaataagcacagacgtattcggatcgtctacaatcttatccggatgtaagaacgccacttcagacaattctttctcctgtacaataatattttctccttcaggttccaaaaggaaaataatcatattatcactaatctcattacgaataacacccgatcgaacaccaataatccccttcacatgagcgacaatgcctgtctcttctaacacttcgcgtttcacagcttcatcaaccgtctcaccttcatttacaaaaccagccggtaaagaccatttcccttttaatccactgtatttcttcttaacaaatagccacctaccatcttttgtagctactaaaccactaacagctagccataccttccctcgtttctccatgatgtaataacctcctccatcagaacggacagaatattctttcttttttatatattatactatatttttaatatgaaaaaagcagaaacagctcttagccgtttctgctttttctactatatattaaaagaactttaatttaccttttttaagaactaataaaggtccacctaataagaataggtaacggttatcgattactttcttcatgaaggaagctttccaacctgttaactttttacccataacaacgcccattgcatcgtcatgacctaaagaacatacagatcctttattatcgaatgcgaatttcttcatctcgcccttgccacgaactaatacagttaagttgtgtgcaatattgtaaccttgttgaattgcaatttgtgctgttggtgggtaaggacggttaatttcttcattaataattaacgctgcgtcaccaaccatgaatacatcttcgtatcctggagcgtgcatgtactcatcaacttttacacgtccgcgcattgcttcaaagccagactcttccacaataccattaccacgaacacctgcagcccaaactactgtttcagacttaattaattcagtgtcatcgccattcgcaacgataataccttcttcagttgcttctttaattgctgtaccgatgcggaattctacaccttttttctcaagctgttttacagcgtattctactaacgctggatcaaaacctggaagtgctgttggagcagcttctacacagatgatacgtgctttttcacgtggtacattatactctttgcaaagttcaggaacacggtttgcaagctcacctacgtactcgataccagtaaatccagcaccaccaacaacgattgttactaactcatcgcgttgttcagttgcatatttagagaaactagcttccatatgctcacgaatttcacgagttgcattaatgttagcgattgagaatgcatgctcttttaatcctgtaattccgaatgtttctgattcgaaaccaagaccaattactaagtaatcatactctaactcgccatcttttaagataatgcgtttttcagcagctttaatttctactactgtgtcttgtacaaagttcactttatttgtatcaataacgtcttgaatatctagacagattttttcatcttgtaatgtaccagctgcgctctcatgtaaccaagtcgcttggtagtgatagctgttgttgtttactagcgtaatttcagcttcatttacagataatgctttttgcagacaaacagtcgtaatcaccccgccataacctgcacctaaaactacgatttttggagtcttcaccaaatcacaacccttttctttatataatagtaataaaaaataataccaagtactaaaaactctatttgtcaagaatgtggaatttatcacattctatatcataacaaaacgcagtcaaaaaatcgtacgaattttgtcatagaaatttaacataatacttccctatattagtcggttttattccagaattcaagcgtctggagaattatcaatattttaaaataacatagcgttttcaagggttttttagcctttttttcatgtattttcctttctgtatattttatacaataaaaaagaacctatgcgaaaacttacacacaattcagtcgttttcagaagtattatgaactcaaatatgctatcatttatttgaaagtgtcatcatttgcaggattttcgtgtacatatgaacaatatatgaaatcaatatcaaaattccatctatagggggaatgaaagtggcagaaaatcaaaaagtttacgacataacaattattggtggtggtccaacgggactgttcacagcattttatggcggtatgagacaagcaagtgtaaaaatcattgaaagcttacctcaacttggcggacaattatccgcactctaccctgaaaaatacatttatgatgtggctggatttccaaaagtgcgcgcacaagaattagttgataacttaaaagagcaaatgaagaaatttgacccaactgtttgtttagaagaagctgtcgatacgcttgagaaacaagctgacggtatatttaaacttgttacgaataagcaaactcactattctaaatcagttattattactgctggcaatggtgctttccaaccacgccgcttagaattagaaggtacagcgaaatacgaaaagaaaaacttacattatttcgttgatgatatgaataaatttgctggtaagcgcgtcgtagtatttggcggtggcgactcagcagtagactggacaatgatgttagaaccgattgctgaaaaagttacaatcgttcatcgtcgtgataaattccgtgcgcatgaacatagcgtagaaagcttaatgaattctcgtgcagaagtaagtacaccatacgttccagtagaactcattggtgatgacaagattgaacaagtcgttcttcaacatgtaaaaacggaggaaaaaattatcatcgatgttgatgacgtaatcgtaaactacggcttcgtttcttctcttggcccaattaaaaactggggcttagatatacaaaaaaacagcatccttgtaaattcaaaaatggaaacaaatattcctggcatttacgctgctggtgacatttgtacatatgaaggaaaagtaaaacttatcgcttgtggatttggcgaagcaccgacagcagtaaacaatgcaaaagcttacttcgatccaaatgcaaaacttcaaccgatgcatagctcaagtatgttttaatatgcaaaaataaagctccttccatacgtggaaggagctttccttttatataacataaaagcacactgagtccaataaactatcgaactcagtgtgcttttcgtctaaaaaattattgttttcttcttctacctaatacgaataatactccgccaactaagaatgaaattcccgcaccaactgacatcatccatgaatgtgctccccctgttttcggtaattctttttctacttttacttgcggttctttaattaacttttccagtcttacttccggtttctccggtttcacttctggtttcttcagatctttcggttcctccggtttcacttctggttccttcggctctttcggatcttctggcttcacttctggttcttttggttctttcggttcctccggtttcacttctggttccttcggctctttcggatcctccggtttcacttctggttccttcggttctttcggcccttctggcttcacttctggttctttcggttctttcggttctttcggttctttcggttctttcggctcttccggcttcacttctggttccttcggttctttcggctcttccggcttcacttctggttccttcggctcttctggtatcttaagatcttcttttgttttcggtaaaattgtaactgtaggctcaagtggtggatttattttatcgtccactaccgctctatttgttatccctttacttggtgctgcttttaccttcactttaaaaataatactacgttctttcgtatctgtaatttctagatactttgctattacttttccaaactccatttttaactctattggatttggttcagccccttcaaatctaatgctatcttgcacgtactctaaaccggctggaatttcatcttctacctttacctctgctagtttgccgttttctaccgtatttttgaaactaattcggtattctacttcttctcctagcttcggttctttattatttactgtcttcgtcgcttttaacttaccatctttatattctggctttattgtcgctgtcggttccataactggatgatctggatcatctacatgaatgatcgctttatttgttatttcctctccaacttttaccgattcttttacctttactttaaagatgatacttctttctttcgtatccgtaatttctggatacttcactgttacttttccattctcgactttaagttctgttggcacaggcttatcacctacggcctccagactttctttcacatactctaaaccagacggaatttcatcttcaatctttacatcaactaacttcccgccatctactgtgccgttaaaagtaattcgatattcgatttcttcccctagctttggttcatggttacttacttctttccttgcctctagtttcccatctttatattgaggtgtaattggtataagtgactcaactggtggatttgtcggattattatcatccacaaccgccttgtttataatttcttttcctacttgtaccgtttcttgtactttcactttaaagatgatacttctttttttcgtatccgtaatttctggatactttgctgttacttttccattctcaactttaagttctactggatttggttccggcccatcagactttatactatcctgtacgtattctaaaccagctggaatttcgtcctctacttttacctcagttagtttgccgttttctactgtattttcaaaactaattcgatattctacttcttctcctaacttcggttcatggttactcactgtcttttcagcttgtaatacaccctctttatgttgaggttgtatcgcgacattcggtttctctggtggatttatagtatcttccacaaccgccgtattcacaatcgcttcgccaattttagctttttctttcacttttgctttaaagacgatacttctttctttcgtatccgtaatttctggatattctgcgagtactatgccgtttttcacttttacatgcaacggttttggattatccccctcagctcttccgctaccttctacaaactctaaactgtttggtaattcatccttaattttcaccttcgctaattttccgtgctcaactacgttacggaacgtaattcgatactctacttcttctcctaattttggagctgggttatttactgttttctcagcttttatttttccattcttatactccggtgtaataatcgcttctggtttttgcggaggattcttcggattatcatcatccacaattgccgtattcacgattttcttcccgacttttactgcttctgttacttttaccttaaagataatgctacgctcagctgtatcagtaatattttcatacttcgctgtaatttttccagcttcttcttttaactctaccggatttgattcattaccttctgcttttaaactatccttcacatactctaatccatttggtagttgatcctcaattttcacttctgctagttttccgttttctaccgtatttttaaaactaattcggtactctacttcttctcctagctttggatcttttttacttacctttttattagctttaaatttaccagctttatgctgcggtgtaatatctacttctggtcgctctggtggattttttgtatcatcaacaattgctttatttacaattgccttgtccacttcaacggaatctttcaccttcactttaaagataatgcttctttctttcatgtcagtgatattttcatacttcgcactaaccttaccagcttcttctttcaactctactggggccggcttatcaccttctgcttttagactatctttcacatactctaaaccaaacggaatttcatcctcaattttaacctctgccagttttccatctttcaccgtattattaaatgaaattcgatattcgatttcttcacctagcttcggtttatgattattcacctttttatgagcagcaattttaccatctttatattgtggtgtaatttttgctgtcggatcaattactggatggttcggatcatcaacatggataatcgctttatttgtaatgtccttccctattgtaaccgaatcttttaccttcactttaaagacaatacttctttcttgcgtatccataatctctgaatactttgccattaccttaccattttctactttcaactccactggttttggctcttcaccttcagctttttcgcttccttctacaaactctaatccagctggaattttatcttctatttttacctctgctagttttccatctttcaccgtattattaaaaataattcgatattcgatttcctcacctaacttcggttcatggttacttacttcttttcttgcctcaattttcccatctttatattgtggtgtaatcggtacataaggctcttctggcagattctttgtatcatctacaattgcctcatttacgatttcttctcccacttttacgctttcttttaccttcgctttaaagacaatgcttctttcctctgtatctgtaatttctggatactttgccattaccttattatttttcacatgtagctctactggtttcggtttagaaccttctgccgtgatactgccctccacatactctaaaccatttggtaatgcatcctttatatttacctctgctagttttccgttttctaccgtgtttttaaaactaattcggtattctacttcttctcctagtttcggtttatgattattcgccactttctgcgcagcaattttaccatctttatattgcggagtaatttccacatgaggctcttcgggctcattttttgtatctactacgattgctttattaacaatctccttgcctacttctgcctcttcttttactctcactttaaagataatacttctttcttttgtatccgtaatttctagatactttgccattaccttgccgttttcaaatttcaattctaccggacttggtttagaaccttctgcttgtaaactgttctccacgtactctaatccagctggaatttcatcttctactgtaacctctactagttttccgttttctaccgtgtttttaaaactaattcggtattctacttcttctcctaatttcggttttttattgtttacaaatttctctgctttaagcttaccgtctttatattctggcgtaattgttacttctgaagttgttggatcttttgtatcatcaacaactactttattgacaaggccttcaccaactttaaattcttcttttactttcgctttaaagacgatacttctttcttctgtatccgtaatctctggatatttggcgattacttttccatctttcactttcagttctactggatccggcttagtaccttccgctcgtaaactatctttcacatactctaatccatttggtaaattgtcttctatttttacctctgctagctttccgttttctaccgtgtttttaaaactaattcggtattctacttcttctcctaacttcggcgtttcattatttaccgtcttcttcgcttccacttttccgtctttatgctgcggagtaatttctgccgtcggtgtttctggttcatttttcgtatcatcaacaattgctttgttaacgatttttttaccgactttcacttcttcctttactttcactttaaaagtgatacttctttcttctgtgtccgtaatctctggatacttcgccattaccttaccattttccattttcaattctactggatccggcttagtatcttctgctttcacactgttttctacatactctaaaccttctggtaaagtatcttctatttttacctctgctagttttccgtcttctaccgtgtttttaaaactaattcggtattctacttcttctcctaacttcggcgtttcattatttaccgtcttcttcgctttcacttttccgtctttatgttgcggaataatttctgctgtcggtgtttctggcggatgtttcgtatcgctcacaatcgcttcattaacaattgaatcgctcactttaccttttactttcactttaaaggtaatacttctctcttttgtatctgtaatctcaggatactttgccattaccttaccgttttcaaattttaattccactggatctggcttagaaccttctacttttaaactatctttcacatactctaatccatttggtaaatcatcttctattttcacctctgttagctttccatgttctaccgtatttttaaagctaattcggtattccacttcttctcttaacttcggcgtttcattatttactatcttttttgcttcaagttttccatctttatactgaggagtaatttccgctgtcggattaactggcttattttgcgaatcatcaatagttgctttattaatgatttttttaccgacttttacttcttcttttactttcactttaaaaacgatacttctttcttctgtatccgtaatttctggatattttgccattactttaccgttttcaaatttcagctctactgaatctattccggcaccttttgctttcaaactattttctacatactctaaaccttctggtaaagtatcctctactgtcacgtctgttagctttccgttctttaccgtatttttcatactaattcggtattctacttcttctcctaacttcggtgtttcattatttacgattttcttcgctttaatttttccatctttgtgtaatggtgtaattttcgcttctggttctttcggatctttcatatcatcaacaattgccttattgatgatttccttccccacttccgcttcttccttcacctttaccttaaagacaatacttctttctttcatatccgtaatattgtcgtattcagcaataacttttccatcttttacacttaactttaatggagctggtttatcaccttcagccttttcactgccttttacatactctaaaccgttaggaattgtatcctctattattaccttttctagttttccgttttctaccgtgttcttaaagctaattcggtattctacttcttctcctagttttggtgatggattatctactgtcttcttcgaatcaattattccatccttatgttgcggagtaattctttcctccggttcaatcggtggatttttcgtatcatcaacaattgctttattgacaatctctttatctacttttacttcttccttcacctttactttaaagacgatacttctttctttcatatccataatatcgatatacttagctttgactatcccattttcaacagctaattctactggttcaggtgcttctccttcggccttgatgctattttctacatattcaagaccttttggaattgtatcttccactcgcaccttttctagttttccgttctcaaccgtattatgaaaactaatgcggtactcgatttcttcgcctaactttggcttcttattattaactacctttgtagcagcaatttcaccttttttactttgcggtgtaataacaacctttgattcaacaggctcatttttcggatcttttgcaattgctttatttacgattgcctcccctacttttgccgaatcttttactttcactttaaaaacaatacttcttttttctgtatccgtaatttctggatacttggccattactttgccatcttccacttttagttctactggctctggttttataccttcagctttcaaactatctttcacgtattcaacacctttaggtagtgtatcttctactagcaccttttctagttttccgttttctaccgtattataaaatgtaattcggtattccacttcttctcctagttttggtgtttgattcgttacgcttttttctacatccactttaccgtatttataatccggcgtaatcttttcctctggatgctcagtttgtccatttggctcactcacaaccgctttattaacaatcgtttctcccgcttttgcctcttcttttactttcactttaaaggcaatgcttcgctcttttgtatccgtaatctctggatattttgcgattatcttaccattttctacttttaactctactggatttggtgcagcaccttcagctctcacactgccttgaacaaattctaagttagctggaatttcatcttctattgtaactgcatctagttttccgttttccaccgtatttttgaagctaatttgatattcaacttcttctcctagcctcggcttcttatttgttgcttttttctttgcagcaattttaccggccttatgctgtggtgtaatcttctcttctagattctttggtggatttgttttatctctaacggttgctttattaacaatttcttcaccaatttttgcagtttcttttacttttgttttaaagacgatacttctttcttccatatccataatttctggatactttgcaattacttttccattttcaaacttcagctctactggctctggttttgcaccttcggctttcaaactatctttcacgtattcaagactacttggtaattcatcttcaatggtcaatacatctagacgtccatcttttgtcttatttttaaatgtaatacgatactctacctcttcacctaacttcggtgttttattagaagctatttttctcgcctctatttcccctggaacttcttttggggtagtaaccgtaacatttgcatcgtcctcagtttcatactttatctcggcactatcttgtccctttacaacaacgacattttttactgttgtatctgattgtacagaatctttcacttttactttgaatgtaataacggtactttcacccggctttaaaacaccgccgtctttagcattagcaccttcaccaacacggaaatcaatttgattatttacaaactccgcttcatcatcgcttgcatcatctgttttatttcctttattacttccagaaacatattgaatagaccctggaacatactctaaacggtcatctaatttatcaaaaccttttacattcgataccggcgcttgattatttttcgtatcatttttcacttcaatttgatacgtaaactcttcaccagctttaatttccttaacttctttaccggtactatctaatgcctttttatcaacttgtaagtttggagcattatgttctgtaacgaatgtggcgttatttaatacgtaaatatcaccgccaccaccatatgctctaaaacgtatttttccttctttcaaatcattctttacttgagtgggtccttcaaggtgatacgtatgaatatctgtactgaaagaatttgtccaatctggattatatcctgggtattttttcgtaacaaattcgttagtgccatctacttgtacttctgtcatagatgagtcattaacatcattatctttacttttaatatttttaaacttttgataccctaacccaaaatcatactctccataatcataggcatatccatcattatcagctggatcaccttgcgatgaaaaataactaaattccgccttgaaagcgccttcttttggtgtgtttattttattaacactaatatctgtccaggctgtacttttttgagagactagcccttcccaaatcttcatgtcttttactgtttctttatagttttcataaactaatataagattccagttaccccagtaatagccgccacctgttacatctttaatttgtggcacatttgcaactgtcaacgtttgagaaataccttgctgtgcaattatatttgttacatctgcatacgctacatatcctgcgccactacctgagtaattagaaatataaggtagataatcagcttttcttatgctatcagcagttacctctgcatattctttatttcccattctcattttgactggttgccttacttgatcctcggtaacctttctatcagcgatatttcctggtaaccccattgctgctgtccagaataagtaagcctttttcactttacttccagcaggaatgttaggaaatgcacctgttgacgaattaaaagtactatcatcgttatcaacatcaaccgtcattttattcgttttataacccatactttgtctgccataatgatcagatgtcaaaccaagcgtcacattaccagtctgtactaaattaccaggagcaattgtagaatacaacgggtctccaaatccttgtttatctcctgtttggatttgaaccttcgaagcattttctgatgcagcttgtacttctgcatcactctgctttactgctaaaggtgattgctttttctctttttctagttgcttctcagcctcaggttgttttatcttctctatttctgttttttgtgcagatgtatttttatcttctacagatacttttaattttccatccacttctttagtttttgaatcagttgttgatccgatagctttcttactactgtcagcctcatcatcggtattagcttctaacttctcttcagaaggaagcccttcaacatctacagacatgtttcctatttgtagttgatccttttgcacactaattttttgcttatactctttattaaaatgttgcgcacgacgagcttttattaatacagtcattttttcatgtgattttaaatcttgaattttaagattagaagaaagaacctttcctccattatctttttcctctacatagaaatccgctaccttattttcaagtaacttctctccgtttactttcacagattgcgaaagaaactcaattccattgtcattattttgtttaattactaattctcggattggtgtatctcccgtattttcaatcttatattgaaatacgtgctccctctccgctacttctcccttatacatttcagcattcacttgatctgccttaattttcacatcatttccttgtaactcatcccagctttttttatttatctctgtagcaaaagcactgggcgaaggcaatatgatggatagaagaagtgtgatcattgttacgacattaaaacacttcaatacttgcttcatattttctacctttctcctttctatatacttgctatccgcctacttcatttcagtaaccctttcatttagtagccgaatacatagcaatatatatccactcgcaacaatccgacctacgaaaatgtatcgttgaaatcccaatgtcaacaatataaatctcatagaatattactattttaatttatcaaaaatagcatatataccggacacttatacaaacctttaccatacttttaatatagtaaaaacatcgtgctgtataggtttatataacagttaaaggatacttaaaaattttaacatactcctcaccctatttatacatacaatagaaaatttaccattttttagttattttcagtttgttttttatgattaaaattttctaaaaataacaaccgttacatgtaaaaatatgttatattaaacaagaacaaacgttctttttttaaaaaaaggaggaattttttatgctacacgaacctattatcgtaaaaaaagaagctttccacgcaatcggcgtttcggttacgacgactaatgaaaaagaggcatctactgaaggaaacattccacaactttggaaccgatactttcaagaacaaatgatgcatcacatcccaaatcaacaaacgaaagaaacattcgctttctactcaaactacgaatcagatgaaaccggtacatatcaatttacaatcggtatgcctgtttcttcattagaagacgttcctgaaaatatgacaactttaacaatacctgccgctacatatgcggtatttacaacaagaaagggaccagttgctgaagtcgtttgtgaagcttgggaatatatttggaaatggtcgaaagaaaataaacgtgccttcacaacagactttgagctttacgatgaaagagcgttagatccaaacaacgttcaattggatatttatattgcgttagcctaaaaaaagatgcccattcggcatctttttttgtcgttaaatagctactgggcaaattcattattattgtctacaatgagaaagtgcagtatagaaatattagaaactgtataaaacgattgttaataggttttttagtttaaattcgtcacatagaaaggaagcaatatggaggaactacaacaaaataaaactgctttagaaggaagcggaaaaccgttattaaaaaatacgaatttcctttttctttgggcagctactcttttttcaagctttgctttagccttttttactttttcacaaacgtggtacatagcaaaaacattaaaccttgaagcttcactcggtgttgttttcgtagcccttagtgttccaaggcttatttttatgattgtcggcggcgctgtagctgataaattcccgaaaaaaaacattatgttttactccaatatcattcgagcgattcttgtcgcaaccattctcacatggttcattgtcggtgatgtaacactatatacatttgctttattcgctttattctttggacttgctgatgctttcttctggtcagcggatggatctatcttaccggaattggtagaaaaaagccggttaacacaagcaaattcacttacacaaatgacgaaccaagcatcggtcatcttaggccctgtacttggtggtattctcattaaatttacgaactatgagacaatcttttccattacgattttattactgattgtcgctgccatactcgttcaaaaaatacaatttacgatgccagaacaaaaagatacagataaaggtatgttcacttccattaaagaaggaatcttatatgtaaaggaatcgccattcctttcaactttccttatttgtagcgcttttttaaacttatttttaatcggcccgatgcaagttggtttccctctttttgttaaaaacgttctgcatggtgattcgctccagtttagttacttagaagcatctgtaggcggcggaatggcaatcggtgctatcattgtaggtttaaaaaatattaatcgtagacgcggtctattttgtattatcatgatgctattgtctggtgtattcttcttagccatcaactttagcaccgtactttggcaagcactattagccggcatgttttatggtattacaatcgcaatggcgattgtaccgcttatggcaatgattcaatcgacagtaaaagaagaaatgatgggacgcgtaatgagtttacttatgctatcatcaatgggctttatcccgctctcttatgcattcacatcacttgcacttgcaatgggaattccaatcgtaaccgttatgaaaagtggtgcaatagctgttatcgtcttcgtactatttgtagcgattcgtgttccagttgtaaggaagttcgattagccacttagagtcatgtattatacgcatggctcttttttgaatggatcaaatagtgatattcccttacttctccttaatgctgctccccattctaatccaacctctaaaaataaatctcgcactgtactgtataaaagtgccccaatgtctttacaaatttccccatatttatatgctcttacaacacttttcacgcgccaaattaaatttccatacacttcttcgtcagctaatatttgctctagtaaaacaccttgttctagtaacccactctttttatacgcaagctcgaccttactccaaaatatattaattttcttcggattactcgtcatcggcaccagtgcgtatataaaaggcttcggtatatcatgacggcaatacgtctcatcaagctcatacgttccttttcttttctcttttatttgtgaaatgtttttagaaagaattgtttccccagcaattttttgctcatttttactacagccagttgcattatcctcagttttacaagcggacattttcatacggtcatccatgcggtcaatcgcagatgtaagaaatacatataagttcgcactatacccgccgcgtttatgcctttcttttgttgcaacacgctttataattcctagttcctctaactttgcaattgaacggcgtactgtacgaatactctttccaacattcgtcgcaatcgtccccattaatggacaagcaacccctactgttttttgtttctcattcaccgcatattttcctaaaaaatgaataatgatagaatcagttttattcaattgaaatcggtagcacttcaaaacttgtttttgatatgtattaaactcttctttacttcgaaattcactatatggtttcattaaattatataagcttcccatttatatcacctcatttataagtaagaggcaggaagcgaaattggcgtgatagttaatattttttaatggagatgaaaatatgatcgtaattagcgcttgtttaggtgggattgcttgccgttatgacgggaatgacaatctcgtttcaaaaatagaggagcttctgcaaaaagaagatacagtcctcatttgccctgaagtattaggaggactaccaacacctcgtccttccgctgaaattattggcgggaatggcgacgacgttttagacggaaaagcgaaagtgataacaaaaaatggtgaagatgtcacagcagctttcgtaaatggtgcttataaagcattagaacaaattaaagatttacacccagaatatattattttaaaagaacgcagcccatcttgtggtagttctacgatttacactggagaatttaacggtaataagcaaactggtttcggagtgacaactgctttatttaaaagacacggatttaaagtcatttcagaagaagaatttgaaaacaaaaaaaggaattgaccctgttcgtcaataaaggttatttacgttcgttttaaaaatagtaataaacccttatatatcaacggtttgtgtaacgttaaaaatcatgaataaattttaaattttattcattcgttaccaaaatgtgaccataaaaacaaaagagcacagcgtgtatatatggtgttggaccaccgtatataccgtccacctgagctgaccaggtaaacacttgctatactctcatgagttattttacctcatacaaggggtattaagcaacgtttaccaataaatcggtgacgttgcttttttgtttccaaaaaggagacaaaccgttatgaaaaagtgtattgatgtattagctcaaccagagtcctatcataatttatcaacattttcaaatgtacaggaattaaatcaaacgattagagtatacagagatgtaattaaaacgtctattaaacgtgcagatgtacaatctaaattaattgcattacttgaaattttaaagcgtcatagctgcaaatacgtaggtgttagtttcctatgtaaaaatagaatagctgagataatgagcgtatcatataaaactgtacaacgtttaatgacgaaacttgtgactttaagaataattaagcaaatagccatgaagcgaaaaaaagatatgcgccaaacttctaatgcaattattatccaaccaattgtaaatgaagtgtcccacaagcaccctactgaaacgactaagaagtgtcctaccgttaaaacaaatactaaaatcttaaaacaaaagagtaaagatataaataaacgtaatggtaatgacaataatgctgtacctaaagaaaacattaaatgtgctgaatttgtagcccattgggttccgaaacgtttcgtttccctaacttcagcattttattcaaaagctaaaacaattcaagaattttggaaggtcgtaaaacaatgcaattgtgtaataaatcatacaacaggccaaacggcgtttgacaaagaacaagaactacaaattggtgtacaagctatgaaagaatttgcgatgaaggtaaaagatggagtcaaaatgaaaaagggtaagtttgcgtatttcaacggtatcgtaaacaatttgatgaacaaatattattttgaccctgaatttggtatgtgatgctctcttttacacttcaggtatcacatatacctttgcatatacaccttgctgcacagcaaattgttctagcgtcttttgcctaaatggtgtgagtgtaaagaaatgaaggatagggactttcccgttatatttgtttttataatacaccgtgaattcaccatacttattcattttttcactgttcacattcatcatttgtgtacgatctatttcgactgcattgagaatcccgtcactatcacggtactttacatccggaataatggttcgcttcttgtcatctactttataacgtataggggcttctatctgccaatcctcaggacaaaatagattcagccacgcttcgtttctcatgaggctgtgtgctaatcgaatggtgggcacaaccttttctacatcatcgaatagcgcacgtccttgtttattgaggtaatatacatgctcttttttataaacggtactattcacatatggacttaaatcttttaaaattcgatttgcatttcgaattcctcccatatcgtgaattgccattaagtgtcttcttgtcgcaaattttagctttctaatcgaggtcaaaatcatcatctgacgattcattttgatatgtgtctgcatatgcatcctttttcacctcgtattgttttaatacgtcccacatctgttcatttgagatataagggacttgaatctctgttaatcgatcagttttaaaaagcgcacgccctggtatactttcaatcgattcaagaccagtttcatcgatgacaacttgagaagctgtttgagttggtaaccgaaatcctaattttgcatcactgttttgtttcacttgacgtggtaaagtatcgccagtaggatattgtgtgcaaaaaatcaatcgaaatcctaatgctccaccaattcgcgctatgtgagaaatcatctgttgacaagctcctaataacttttgttgttccctattcatacttttatcaggacaaagttctgccccttcatctacgataataaagtagcgttctcttatatttgtttctaccacattggtataatggtgttctttcataaaaagcattttttcttccatcttttttagaatcgcgcttaatacctgaaaagcttccagtggcttttctgcaatagaatcaacctgctttatgttttggtacggtccgaactctaatcctccttttaaatcaataataaacaagtgcgtattgtttgcttgtgcagtaataagagatgtcatcacattctttaggaatacagtctttcccatacgagttaaaccacctaatgtcatatgtggtgttttatcaaaatcatgataaaccaattgttctaaactttgcccgattggcacaagccattttccagcttgaattaaatttgttgaccattcccatttctttggtatttcttgatcgaatacacgtatgttcaatttataattgtcatactgaattcgaacaggtttatttaacccttcacttacaacatcttcaactttttgaataattttactcggcataccaacaggcaactcatacacatatgttgtacttcgatcatcatgagttcgcttcttaaatgttggataatgaatcctatcatcttttttaattgcaattcctgacacttcaaaaaatacttgtatcttctttttatcatctattttacttttaaaccgatcacttacgaatgcaatagttaaagctgtcgtcgggaccaatagtaattccagcataaacatttctcctttagatatcctataaggatatcattgcactttgttggaagaagacagaacaagcattttcgcttatgaattctactgtccctctcttccacatcatattccttcatagaaacataacgagaacataacgtagaagatataagaacgagcccgtaagcgtcgtatacaaggttatacgtggaagccaatgtggaacactcttccccattttttcagctacactcatcgcaattacagacaaacctgttgccgtccaaataatgactgcttctcctgcaagtgtcatagccattcctcctcaaccagttcctctttctcacgaaatttaatccctgatttggtagctacaatttgataccgctccattaaatcttgccaattcaatatatcttcctcttctccatataaatcttcttcaataacttgtgataagttgaaataccctttgtattctttattatcaaatacttcatggttcctcatgtgagtaagaatagattccgtctcttttctggatcttgattcgttatacatgtgacgtaattcttttgatgaatataaatacggcgttacattgagataactatactgagaacgcatgcaaccctctcctctcttaatatctacgatgccatttggaattccaagtagaagtcttcgtgggcttctgagtggaagtaatataggtatatgatgtagaactttaaaacttgtttgtccacaaataaaaatattagaggtttttaaaaattgaaatagaacattgaaaaaggagggattttatgaagtgtaaattaaagataatcttggccgaacgaatgctaaaacagtctgatcttgcgaaactggtgggtattacagaccaaacattaagcatgatagcaagagggaaaagtgaacctacgttaagagttgcgcttcgtattgcaaaagctttggatctgactgtggaagaaatttggattgaagaggggagataatataatatatgcctagacccaaaaccaacttgaggattgtaaaagaagtatacggtgaacgaaaaatagaggaagtttttgaagaactttacgaaagaaaatacggattaaaagttaaggtgagcaggaaaacatctgaaaaattagccactgaaaaacaccaagagaaaaaatataaccaggagtaattacaatgtcaaaacaaccatcattcaaaacattaaatcgaattattgaaaaatattatgatcctaaaaatggattaattgaagtagagcaatttatcataggttttgaagcggaatcactttttgtattagattacaaaggcattatgtatcaaaaaacatctgctctaaaatatgatcagggttatgaaatcttattacttccttatacagaactacattcaaattctaaacaagatttactgcaactattaaagcgtaaaattattgtttatttcacgtatacagatcatgatcaacaacaagaagactttatgcccgatataggaaatcgaattttttcatttatgagccatatgttaaaaggtgcacagcaaaataaaagagcgattccagtacgttttattttaatggatattgaagcaattggttttattcctaaactttctaaatttatggctgggtgtcgaggctttaatgtaggcacttgtttgtttgtagatgacagattgacactgtcatatggatataataaagaacaggtagacaaaatgtacaataacagtgtagttacatcaaaataaaatattatgaatatgtattaattcaatacaacttaaaataggaggttgaacacgtgagttatgataccgtcgcatcgctacaacgcatgcaacaattacaacaagcgcaagctgcttctggaaaacgcatagtgttaaaaagagtttatgaatcagataaaatttctgcgttcattatcgttctttgtattttagctatcccagcaacaatgtgtatatcccttttagttggattagtgatctattacattagagaatttaagcgtacaacatatttagttaaaaacgttgctactggagagaagttcagagtcgataaacaagactttaaacaatataagaggaattttatgaagaaagaaaaacaagttagaagaatttctgatttataaaactattcttttgtaaaaatatatttaacatatacatttatcggtcaataataagttctatccttcactaatattggatatactatttatacatttagagaatcaccacatgaggcaccttcagctggggaaggtgcctttttattttgatggaacattacgtactttagaagcatatattaaattgctcctagcatgatgcctttctatatacagaaaaagcattccggcctcaccaccctggattgctttttctcatatttcagcatgttgctacatacaatgtaattaacacgttccctttttatatagcatcctatgtaatcagagcactccacaagagtactctgatttttattgttcatatttattcctttcgttacatatgattactatcgacaaaccaaatgagagatatatctttataatgttaaaaaagagcgtccctcactcgccagtgaactgcaccccaattgttagacacagtctaacaattgggggtgcagtttttctatggctaaatttacagctgatgaaaaaatacaaatcgttctacgttatttgaacggaaatgaaagttatcgagaaatgggtagatcgctcggtataagtgacacaatcattttgaattgggtaaaccaatataaacagaatggtctggaagcttttctaaaacgatgtacaaattacacacaacaatttaaactagacgtactaaactttatgattgaaaacggtatgtccttatttgagacggcagctatctttaatattcctgccccttcaacgatttctgtttggaaaaaacagctcgaaacacaaggaattgatgcccttcaatctaagaaaaaggggcgtccatccatgaaaaaagattcaaataaacaagtaaaacaacctttagctgaaggatcagtcgaagcacttgaagcacgcattaaacagcttgagatggaaaatgagtacttaaaaaagttaaatgccttagttcaaaacaaggaaaaatcacaaaacaagacaaagcgcaagtagtctatgaattaaggcataaatattcggtgaaggcactcgtggagctagctattattcctcgaagcacgtattatgatttagtaaagaaaatgaatcgtccagatgtagatgccgatttgaaagctgagattaaagcgatttatgaggaaaatgaaggtcgttatggttatcgtcgcattcgtgatgaattaacgaatcgtggccagaaagtgaaccacaagaaggttcagcgcattatgaaagagcttgggttaaagtgtgttgtgcgtatgaagaaatataaatcctataaaggaaaagtcggtagaattgcacctaatattttagagcgtaattttcatacagatgcaccgaatcaaaagtgggtaacagacatcacagagtttaaattgtttggagaaaaactgtatgtatcacctgtattagatttgtataatggtgaaattattacctatacaattttcgcttgtttcagacatgttagagaaagcattggaacgtttacctgaaacccaccagctactgatgcattcggatcaaggatggcattatcaaatgagacagtacgtccggacacttgaatcaagagctatcgtccagagtatgtctcgaaaaggcaactgttacgacaacgcagtaatagaaaatttctttgggattatgaagtcggagttcctctacataaaagaatttgaaaatgtagagcactttaaaatagaattagaaaaatatatagattattataatacgaaacggattaaggcaaaattaaaaatgagcccggtacaataccggactcacttttatcaagctgcctaatgaaataaccgtgtctaacttttaggggtcacttcacagaggaatgctcttttccgttcatttcacatacacataggccttattcgtagtctcagagtatgaacaatctcaaaaatggtgttatcctaaccctcaaacctcacatactccccagaaacccattgatttccaccaacgttgtaccagccatattgaatgccccaagattgatagcgttcccctcggtacacattcttcacaataccataattcgttcctggacctgtacgaacgcgtaagacattcgctgtaattataacaacacctacaccattgttagatggttttgtagaacctgcattcccaccaccgttatatgcgttctgcaccctttcaataaaagaattccaacgcccttctgctaacatacgatgcgggcaatactttccactccacgattggtgtgtgcgaactttatttatcggaatgttgtattgtttcatgatttgcgctacaacaatagctgcattattttctgctttataatatctatccccgccgcttaaagaataacagatttccacactaatcgactttctgttgcctgaaccattcccatctccacaagcccatgcattccgttctaaaggtaatccttgtacagcttctttatcgtctaccgcaatgtggaatgacacttcattattatttcgtatcatataagcaatttcattctcagctggcgcatcattatacgtattgtgaactgtgataaattctggattcattgtataagggcactttgtaccatatttacttgggtcaactaacttttttctaatttccattattgaacatccccttttttctcttcttgtttttctttgccacctaaaatttcaactgcattttttaaagcttgcggaagtggaatgcccattcttccggcattttctaaaagtgaaagtaactcattacccataaagaaaaaaattgttgcttcacggattgcactattacttcctaacgctgcatctaattgcgctgctgccccaaccaaaagaaaaagcaccacctttttggcgatgcccttgaaaccaactttactttttaattctccgttatatcctgctgcaatcatgccagttacataatcaataactgccattgtcactaagattttcaatgttgcatcccatcctcccaagaaataaccacaaaacccaccgaaagtggcaataaaaacttttaataatacatcgatacgatccacattcttccctccttcttcaagataaaaaagagagacacttgtccctctttcacaaatacttttatataaacaacctaaatcccacctttaagtatcaaacccaaaattgccataactattgcactgacaacaattcgtaaaatccaagtggtatttagactgattttttctaattgctgattgatggtagaaatatctttttcgtttatcgttgtacgagtttctaaattacgaatatctcgcatgatttatttttgctctgcttttaggctttcgatttttacatatacgtcttccatacattcacatcccttttgaaatcttaataagacaatctctatatactatgagacaactcttttctgagtgaatgcatgaaaatttttttatacaaaagccctattttgtgcaaaataaaaacagcttatggctgctttggttcctcatttattaattgttgtactaatacctttaattcagcaatttcagctttcattgaaactttctcaagtttttctacttcaagttgttctttaagagtgtcaacttcctgcttcaacataccgtggtcaaattgaagatttttaacttcaaagtgaacttcttgtattgcttgaatagaaattgaaaccgagctataaagtgttacagcgtctttctgtggtgtggtgaatacatcgtcagagtcctccgcaatcataccgtaattaattggaagtataatagactcccctgactcgaagcgttcaacatctcttataaagtgatactgtttgataagaaatatatgacgtattataatcattatagatatcaatggaatttaaaaaagatgactcctgttggatacagaaatcatcttcttgatgttgcctaacttttttcaaaatgtcctttacaaagggtacagattagttagatgctttctttttttggtatttttggctatctgttagttacttgtttcataagtggtcttatttctttaactggtggtttcttatcataggcatcaacgtaagaaaagtagtagtttaagtttcttagaagaccttttcctatttttgcacttaagaaaggaaagacttgtccggtataatcatcgagagatttacagtaatatttttcatctaaatatatactgtatttacatgttagttctactaaaggattcccttcatcatcaaatacttctttagaatcaataatatctattagtgcaaatttttcatttaagtaaactttcttttttttctcgtgtttatttgtaagtataaaaacgagaccaatcgcgttaatcaaactatttcctcctataaaaaacggatattaataaaatatatcgatataagctaaatgtaaagaggagaggtgaaatatcatggagagaaaactaaataagccgattggtgagagctgataatcagtgggggatgaacaaccccctcactgattaaagtttcactttattgaaatacttgcgggaattgttttacgattgcgtttgttatcatgtcagccatttctaatgcttctttttcaattttatcgtaaagttttactcctgcttcataatctttatttaggaaggcaagtgcttctgctttcgttagtgctgaatgttcataaaacatttttctaaattcttctttatctatatatgggttgatcctgttaaggaattcaataattgcgtcaccattagcgtaccattttttctctatagcggccgctgcattttgattaccagcttttgcggctttaacaagatccgctgcaattactaagtgatctttaattaatgcactatattttttcactgcatcctcaccgtaaaatggttcaagtgatagtcccatatgtgttgcgttttgtagaagtcgtccaacagtaacattaacatctggtaaattaaatactatacttataatagccaatctcgtccaagcgacgtgttgttcccataaagaacgcatatacccttttaaaaaattctcatttttactaattcggtagttccgtacggataaatcatagtttacataagggttatggtagggggagtaatacgattgccaataagaatacataaatagtaacactcctttgaacatgtataactcaaagtatgatgaagatttatttttagttacgtgtcctagattatttttagggaatttgaaatggagaaattcaatgaatggtgttgtggtatatatgaataaattgaatataaagtaaaagagggtctgtaagggaagttgcagaccctcaaaagggtattgccgagatgtcggactcgactacgtaatgttatcataaaattcttttgaaaaaacctggtaaatgtgtccaaatgaaattgggaccttcatacagtcaaagggacctgcttcccgcggcaggccccaataactagataatgtcgatgagcaaaaaactcatctggagtacttttatagtaacaagtaaaatgtgttttgtgtattgagaaagaagaattgcataattatatgtgaacaatttaaatcccaacaatttatgattatcattaattgttgggatctaaatatggttataaaatggagaaaagacttggaagtgagatcgaggtacacagaagtatgtaatcatgaaaaagacctgctaatataagcaggtcaacttaaggggtttatccaacagattattatatatggtaacaactgaattgtagtaagtctatacatttaatattgagaaaaattctgtgaatgatatattttttgcacatatattaacgtctaaaaagttgagaaagaaaattaaaaagctttttataagagaataatggctggtacttatagtatgattcatatttccacgcatcattattagagaattggagtttttgtgttttcgtttttgccttgatggaactcatattacgatgtttcatatagtaacctcctgaatttatatgtatacgattagtagtattcaagaaagggaaataaaatgaacatttaaattgaaactctttcttcttgtgtactggatttacgttataaatgttgtaaaacatataaaataatgatgctaattcatattaaataagtgaagaaacatagaataatgaaaaaacaataagcatctaatcatccctttcaagtcgcataagtgattgatataatagaagtagatgaaagataaagaaaagcgggtgactcttttttgtttactaaagcacaagaacttttagcgtcctactttggttattcttcgtttcgaagaggacaagatgaaacaattaaaaatgtactagatgggaaagatacggtttgtattatgccaacgggtggcggtaagtcgatttgttatcaaattccggcattagtatttgaaggaacgacgttggttatatcgcctctaatatcacttatgaaggatcaagtagatacattggtacagaatggcatttcagctacatatattaatagttctatatctattgcagaagcaaatcagcgaattcaattagcgaaacaaggacattacaagttactttatgtggcgcctgagcgtcttgattcgatggagtttgttgatcaacttattgatatgaaaatccctatgattgcgattgatgaagcacactgtatttcacagtggggacatgatttccgtccaagttatttacatatacatcgcatattagattatcttccagaaaagccgctcgtattagcattaacagcaacagcaacaccgcaagtacgtgatgatatttgtaacacacttgaaattaatcaagaaaatacaattatgacaacgtttgagcgtgagaacttatcgttttctgtcattaaagggcaagatcgaaatgcatatttggcggattatattcgtcaaaatcaaaaggaatccgggattatatatgcagctactagaaaagtagtcgatcagttatatgaagatttgatgaaggcaggtgtttctgtatcaaaatatcatgctggtatgagtgatagtgatcgaaatgagcaacaagaactctttttacgagatgaagtaagtgtaatggtagcaacatctgcattcgggatgggtattgataaatcgaatattcgttacgtaattcattatcagcttccaaaaaatatggaaagttactatcaagaagcaggacgtgctggtcgtgacggattagatagtacatgtatattgttatattcttctcaagatgtacaagtacagcgttttttaattgatcaatcaactggagaatcacgtttttcaaatgaacttgaaaaattgcaaaatatgaccgattactgtcatacagaacaatgtttacaatcattcattttgcaatactttggagaagaaccgaaagaagattgtggacgctgtggtaattgtacagacaatcgcgagagcatcgatgtgacaagagaatcacaaatggttttatcatgcatgattagaacgaaccaacgctttggaaagcaaatgatagcgcaagtattaactgggtcgaagaataagaaagttattgaatttaattttcatactttaccaacgtatgggcttttatcgaaccgtagtgtaaaagaggtcagtgagtttattgagtttttaatttcagacgagttaattgcagttgaacatggcacttatccgacgttaaaagtaactgaaaaagggaaagaagtattacttggtaaagagaatgttttacgaaaagaacgagtagagacaagacaaattgttcaagaccatcctttatttgaagtgcttcgtgaagtacgtaaagaaattgcacaaggagaaggtgtacctccgttcgttattttctctgaccaaacattaaaagatatgtgtgtgaaaatgccgcaaaatgattctgaattgttgacggtaaaaggtatcggagaacacaaacttgtgaaatatggctcgcacttcttacaagcagttcagcattttattgaggaaaatccaaattatgctgaaacgattaagacagaagtagtttcagagcgtaaaaagtcaggaaaagcatccgcaaattctcatttagaaacatatgaaatgtataaacaaggtattgatttgaatgagattgcaaaagaacgtaacttatcaagacaaacaattgaaaaccatttaattcgctgctatgaggatggaatggaagtagattggcaaagctttgttccagcagagtatgaatctcttattgaaactgccgttcaaaatgcagagggtgggctgaaatctattaaagaacagcttccgaatgaagtgagttactttatgattcgtgcttatttacaaataagaaagtagagacatataaaggggataagaatttatgtatcatgtgttcgtttatggcacattaagaagaggacaaacgaatgctcattatatgcaaggtgcaacatgcatcgcagacagagcttggacatatggaaaattatttgatacgaatgaaggatatccggccatgacttattcgattgaagaacaggtgtatggagaagtttatgtagtaaatgataagatattgtgtaagttagatgaactagaagaatatacaggtaatgcggagactgatttatatgatcgaatcacgcaaacagtatatgttgctgatagggaaattgaggcatatgtgtatatcgctcagaataaaaagatgttaaagaaagtgatagactctggtgactggcttatgtatcaaaaaatataataaggtagttttaaaaattggaaagcagataatgacgaattcattatctgctttttattgtgtgaataattgtcgttctctttttattcttatagttcttagtacgattccaattccgagaaataaaacagtagcagcgaccccgctagtaggatttaaccaaaaatcactactgtttgtaagagtaataatccctgttattgtaactaaaacagtaggaacagcatcctcgattgcatgcatgataacacatggccagactgattttgtaagtctatatatttcaacatacataattgaccaacaaagcataaggatacagccagatagaagcatatttaatcttgagatagattcaaaatattcatttgaagagcctcctttacttttatttatcctattatttgtgggcagtaaaacgcccattgattaaagtctttaatttttacaatatttgttaatggataaattaaataggagacaaatagaaagtagtatcttttgtatgcatcactatactatatgtgtatttgtgtgattttgatgttgcatattctttttaaattagaaagatgaaaagtaagttttttcggaaaatttaaacggaaactattgactttatgattgggtttttaatacaatgatacttcgactgaaaaattagaacggacaggagggaatcgtcgaaatgagcaacatatttgaagatgagttacaaaaaatgaaggatactttacatacgatggatgagcaattggataagcttgaaaaaaccccggtttattatggagaagattttaaagagcaaattcttgaaagtatgagggagtctaatagacaaaacttacgtattggtgtgcaagagccgtactttggaaggttagattttcaggaagatggaaaagaagaagttatgccgatttatatcggaaaagtaggggtttcggatatggacacgatgaagccaatcattattgattggcgggcgcctgtcgccagtatgttttattcatttaccggtggagaagaattagcattttatcaatcaccagatgggttagtagaaggtgatgtgtatttaaaacgaaacatttccattcgaaaaagagaacttgaacgtgttgttgatacatatgtaaaaggaaatgaagatgtatcgcatgccgatgattttcttctatatcgattaggtgagaataaagataataagctaaaggatattgtttcaacgattcaatcggaacaaaatgatattattcgagcggaaagaaatttaccattacttattcaaggggttgcagggagcggaaagacaacaattgctttacatcgccttgcttttttaatttatgaatatcgtgaacaactagaagcagaaagaatgatcgtatttgcgccgaatagtctgtttttagactacatttcgagtgtacttcctgaattaggtgtagggaatattagtcaaacaacgtttctggattgggcattacgtacgttagatgattcagtgaaactaaagcagacagaagaaaaattgaaagaagcattttcaattaatcgtgatgaaaagaagataatgctaggtaaattaaagggtacgttggaatttaagacgtttattgaagagagaatgatccaatttgaaaatgagttagttccgacaaaagattttgaggcgtgggatagagcgattattccagtagaagatattaaaaaatggatgcaagttgaatataaacattatcctttacagaaaagaagagaacgattagtaggacgaatgaagcgctggattgaaattgaacttaaaaaattcggggaaacaaacgagaaaaaattacttaaaaaagaagcgactaagagactgaacgcatatatgaagttttggccgaaaatgagtgctctttcactgtatagttcaatagtaaaaagtaaagaaatactcgaggtattacctgaagaacttgttaaagaaacagaaaagagttgtcgtaaaaaagaagtgtatgtagaagatttaccagctttaatatacatacatcatcgtataacagggattgaaatcgggcagaagtttcatcacgttgttattgatgaagcgcaagatttttcgcctttccaagtttatgtattaaaagaaattacattaggtaattctttcactatattaggtgatttatcgcaagcgatttatgattaccaaggaattgaagattggaatgcttttaaggaagtattccaagaaaccggttattatgaattgacaagaagttatcgttctacaaaagaaattattgaatttgcaaatgaaataattaaaaatgcagaaatcccagtaggactcgcaacaccagtcttccgcagtggggaagatgtgaaagtaattcatgcggaaaatcaatttactgaaattgtgaagacggtaaaacatttgcaaaatgcagatgtgaaaacaattgcggtaatcggaagaacagaagatgaatgccgtgatatatatgtggaattaacaaatgcaggattaacggtaaacgtaattgaagcaaaccaaagtaaatatgaaggtggtatatcagtagtacctgtctatttagcgaaaggtttagaatttgatgcggtgcttttaattgatgtggatgaagaacattacaaagacacaaaacatgatgcaaagttactatatgttggatgtacgagatcacttcatgacctatggattttccatagtggggaagcgtcacctttaattaaaggattaaaataaagtgaaactataatcagtggggagttttactgcaagctaatgtgagataaatataaaaagagggtttctattactgtctacttaacagggagatgactatgaagaccctctttttatattgaaattaatgttcaattttaaacgaataaagccattaatattaaatcttgatagctaccatccaattttacaccctttgcttttctaccctcttcaaagaagcctagattcttatataattggattgcacctagattatcttccattacctcaagacaaactttttcaatcttactgttatttttagcccaattgattaacgtttctagaagagctcttccaataccataatttcgatattcgggtagtatggtcatcgcaaaagccccttgatgactaattttttctttgtttccgttcttaaaatctattgcaccgactaacttaccatcaacttcagcaataaactgtacataatttggattttcatgataagcttttaacgttttttgaatagcatcgatacgcaccttttttacatcctcaaccgtacttagcatgtatggagcgtttattaaagcttttgaagcagaatctagtattctttctgcatcccgttctttagcttctctaattattattgtttttccatccttagatttataagtaaaaacattagttgataagatactacacacaccctttcggaatataattagttgaattttttaactatcatgcaattattaagtaagaaaaagtcgtatcacctttttctgcaatcgctctacttcaacttaatgacgattatttcaaatatttttaatttttacaaggatttattccgttatatagcccgattgttgaataacatgactggcgttttttaaacaactttattatctctgtacacgatgaattaacgacttgagctgttgtgtaaataatatacaatgaccttttctaattccttagtttgttctttttcccgtacacgaacggcatctactggaatttgtgtatgttttaaccaatctagaataaggtgtagttgttcttgtatttgcccaatgttttgctcctttatgttcttattctgaattctatcaattaattgaagcatatagggaagtttttctatacattcacttaaatctccgcaataacctgaagggaattcatgtgtaccaaattctaaagtattgatgtaattagaaactaggtatatcatggcttcttgttcggtatcaccacctaattcaatcgcttttcgaagggatttttctaaatcgtcttctttattgctagagtccatataaattcctatccatctaaaaggtcttgaatcaaatgggttgttttctgtccatctatatagaatgtcaattagaaaactatttagtgagaaagttaagacctcatctttttcgtttaatacatctaaaatagtaaacagcgaaatggcaaactcttcttgatcttttgattcccatttctttgcatttgtaataaatgtctctaaatgtttaaaagctaattttcgaagtcccgcttcgcgatgctgacagtaacaaataaaatcatgccaatgctcagttgtattcatatgtataataatagtttgtaatgcagtgagaggtttatccattataagtccccaatctattaagcacgtgttgaaaatttagtgttattatatcattacataaattaaagtgggaagaatttaaggtggattttattggtcacgggatccaatcgattggtaatgtagcggttctaacaggagtcattattgactttgaagatgaaacgtaaaaaagttattatgtttatctgaatattgagggaatacaagaattttatttatttaattttcagaaaaaatagactaaaacattaataaatggtataatttccttgttattggaattaaaatgaaaatattagaagaaaaaggatagggttggttttaatgggggattctgatcacaaagaaacaaaggcaatattaaagttatggtttatttatataccacttgcatttggagaatttgtcttttcgaatatcataggttatttaaaaaaataaagattttgtatttgaaaaacaattaacctaatttaattgtttttttatttttctctaataaaccaaacaaaaataaagattttgaacaagatgaagtttatgaaggaaataacgttgattaggtgctgaaaacgggaattattcaagcatggtaattcaccgtttttatagcttcctatagtgagatgttatgttcacatcatatgtatacgatatttgtaacttaatatagcattactggaacttcaaaattagtagttaaggttgttaccttatagagtgttatatataacttagctaaaaaagcacaaatcatataatttgagctgttcattatctgttttttggtaaaaaattatagtttttgtcacattaatactgtacgatacatagtataaaacacatactgtatgacatatagtaatggaaatgaggtgagtgaatggataatttattaaattcgttaattactgagttaagaagagggacattaacgttagctgttttaagtcaattaagaacgccgcagtacggatattcacttgtccagttattagagcaatcaggggttacaattgatcaaagtactttatatccactacttcgccgattagaaaagcaggaattagtgacgagtagttgggataaaacggagagtagacctcgtaagtattatgttttaagtgattatggattagaaatatttttgcagttgaaaaaagaatggataaaggattcgaaagaactttataacttattaaaggaggaggaagagaatgaatttaattgatctctatatccaagaggttgcgaagagattacctgaaaaaaatcgtgaagatattacacttgaactaaggtcaactatagatgatatgttacctgaagattataatgagaaagatgtaaagagcgttctcgaaaaattggggagtccggtttcattggctaatggttatttggatagaccgatgcatttaattggaccacgttattttgatgtatatacaacgttgttaaaaatgattataccaatcgcagctgtcattgcactcatatcaatggttgcagaaaattttataggctatagtggtgatcaagcggtattaaatgttattttacaattgataggtaaaggcattggggaaatttttgaagtgagcctccatgtatttttctggttgacagttgtgtttgttattttagaaagaacagataaagacaaaggtatcgagccgttgacgacaagtttaaaaaaatggacaccagatgatttgaaaaacatctcgtatatcccaaagaaaaaagcaatctcgaagtttgaagtttttggaggtttaatgtggacagcagtttgggctacactttacttttatgcgaattatcttgttggcgtatataacggtacggcaaatggactgaagtttgtctcgccaacttttaatcaagatgttttattgcagtactggccaatcgttgtaattatgatcgtttttgaaatatgtatatccctttataaattagtgcagggacaatggacgcaaagattggcgattgggaatgctattcttcaaatagctgggacgatagtattcattgtaattgtagtaaatccacatgtatttaacgcagggtttattacgtatttggcaaatgcatttactatttcctcagaggagtttaaaacgtggctcattgggggaggaattttcttctacatgttatctgctgcaataaatatatttgatggtttccgaaaagctagtattcgtatgtagataaaaatcggaaatttcgataaaataaaactattaaaaagatagtaaaataaggtgaacatgatgaaaggaagaaaataatgataagggaagcaacgaaaaaagatttagcatacattttagatatttataacgatgcgatactttatacaacagctgtatatgcgtataaacctgtaacccttgaaaatagaatagattggtatgaacaaaaaaaggctgaagagtatccaattatcgtatatgaattagataataaagtagtaggatttgcgacattcggcccatttagagcgtggcctgcttataaatattcagttgaacattctgtgtatgtagataaggcatatagaaaaaatggcattgggtcttcattaatgaaagaattaatcaaaattgcaaaggaaagagagtatatgaccttaattgctggaattgatgcagagaatgagaaaagtattgccttgcatcaaaactatggatttgttcatgcaggaacaataaaaaaagctggttataagtttaataaatggctagatttagctttttatcagctggaacttaacggtcctgaaaatcctatagaagaataaatatttttcggtagcaagaaaaaattcatgctacctttttcttattttaatagctaatgaaaaggttttttacattcaatgttgaaatattagaagttaatataacgatataaaaagagggatagaaatggaaactgttataaataaaataaaagaggtacaatctaattatgtgggaatggcaatttattctacaaaaaataatcgtatagttgcttcgtataatagtgaattaaatattccgttagcatcagcagcaaaattagtcattggatttgtagtaacgcaaatggtgaaggaaaataaacataattggaatgatatacttcattacattaaatttaatccacatgaagatagtgcgcagttatatccgcatttacaaggaagaacttctttaacacttagtcaagcggtagaggtaatgattgcttgtcatgatagttacgttgcacagtcagttgtaatgcactgtggtggatgggatgctgtgaaaatgtacgcacaaacgtacttttcaaaaattcatatacaagagaatgctagagatgagaaaaatgttggagaattaagtgaagttcttgcccttttcatacaaacctttcaaggttataaatcagaaccagaattatgggaaccaattattagcggcatggtaagacagcaaggagagtatgaagaaattccatattatcatataactcatatgacaggtggattactcacagctacaataaatattggtataataggaatgtttaacgaatttccacttctttatgtgattgggggaaaagatttaccgaatcgccgtgaaaataaagaggtagatgaagcttttgcagtagttttaaagtacatatacaaagaatatagtgaaagcatgctaggagtgagcgattgaaaagaaacttaaagactttaacaatcattattttaattttaacgattattgctcttgaagttggaatcgccctatatgatcacaatttgtcattagatacaatttactttgcagcgatccttatttgtattgtattgctttttggcacacgtgtttctgaagagaaagaaagtacatcgaaacgagagcgaagaaaaatagctgttatattttggccatctattttattgtctatcgcttgttttgcagttataaattacataagggtaggctatgtctctgtaccagggataattggcttttcatgctttgttacatatggtggattcgttttgattagtattttaaaggggaaaaataaaatgtagcttactaagttgaaaggaagcaatgtatatgaaacatatagagaacggtacacgtattgaaggagaatacattaaaaataaagtcattcaatataatatgtccatcttaacagatgaagtaaaacagccgatggaaaaagtaagcctcgtagtaaaaaatgaagaaggaaaaatatttggtggtgtaacaggtacgatgtatttttatcatcttcatatcgactttttatgggttgataaatcagttcgtcatgacggttatggtagtcaactgttacataaaattgaagaaattgcgaaggaaaaagggtgcagattaatattgctagattcatttagttttcaagcgccagaattttataaaaagcacggttaccgagagtatggtatcgttgaagatcatccaaaaggtcatagtcagcacttttttgaaaagagattataataatattatgtatactgattgatgggagaaagcatatgtacacgtataaattgcaacaagaacaaccaatctgtgcagaaaaaattaagaagctttatgattctgtcggttggtggccagaaagaaaagaagtcgatattgaaaaaatgttaaagaatagtatagccattggagtatgggaagaaaatgaattagttggatttgctagagtcgtttctgatggtgtttttcgagcatacattgaagatgttgtcgtacatgagaatgtaagaaataaaggtattggagagaaaatgcttacaatgttacttcgagaaatatctcatattgatattgttagtctattttgcggagagaagctaataaagttttacggtgagcagcaatttcaagcaacgaagcaaattgtgatgcatcgtaatcaaacagggaaagaataagaggtgccaattaaaatgaatgcaacaagagcgtactgtttatcgaaaagaaaagcgacagaagattctccagatggctggagtgcaacatgtatgaggcttaataataaaatatttgcgatagtaaatcatgaagaaggtgaaaaggctgcgattacattgaagtgtgatccagaagtcgcattaagaataagagaagattatccagaaacaattattccagggtatcatatgaataaaaaacattggaataccgtttatattcataagggtatagagcaggagcaaattaataaaatgattgattggtcgtatgatttagtactacaatcattttcaaagaaaaagcagcaggagttaatgggttaatatgtattaggagtgtgtgtaatgaaagattcgattaaagatacgtatgataaattagcgagtacatataaagaaaatctagatttcgcaaatccatataacagttattatgaaagaccggcgatgatggagcttattccaaaggaactagaaggaaaaaagatattagatgctggatgtgcagctggatggtatacttctcaattcataggaagaggagcaaatgttacagcaattgatgtaagtcctgaaatggtaaaagcagcaaaagaaaatataggagaagaagcgacgttcctttgtcatgatctgcaagaaacattgccatttgaagataatacgtatgatgtgattgtaagttcattaactcttcattatatagaaaattggaatcaagtatttcaagaatttcgtcgtgtattgaagccaggtggagaacttatttattctattcatcatccttttatggatttcacaaagtttccatgtgaaaattattttgaaaaacagttattaatagatacttgggttaaaccgaatattactattgaagtcaagttttttagaagatcattacaagacatactaaatgaaactacaaattattttgtattagaagagatagtggaaccgaaggcaattgaaaaaatgaaagaagtaagcgaaaaatcatatcattatttaaatatgaatccacattttcttatcataaaagcaatcaataaatagctagtaaaataactttgttttactagctatttacagttttacattacatattaggagactttaaaatgaatatgaaacgaaatagagtagtatatgcactatttactatagttgttattattttaggtcttagctcaagaaagtttgcttttgcactaccacatctattaaatgattatttaggtgatgcattatgggcattaatgattttcactggctttggatttttgtttcctaaaacagagacgaagaagttggcttttattagtttaatgttttgctacgggattgaagcgagccaattgtatcatgcggaatggatagatagcattcgtgcaacgactttggggggactcgtgttgggatacggttttttgtggagtgatgtagtggcttatacaattggtgttggagtgggaatactgtgtgaggttatttttcggaagaaataagaattgtaaaaggggtatttgtaaatggaacaagcactggaaattgcaaagctttggtttcgaaatgaacatgtcacagctactgtaatgcaaccaaaagtagcgaaggttttatgcaagaataaagagtacattttaaagagaacgggatcgataaagcaacttctagttgaattcgatgttttgaagcaactgtatgaaaagggaattaaagtacagagagtagtaaagacagaaaatgatgaacaatatgtattatataaagaaaaatattattgcttatatgagtatgttgccggaagtgttttagaaataaaagatacgaataagctggaaaggctagcaagtacaattggagaagaaatagctaatctgcacaaagcattacatgcggtgaatagtgaccatgagttaataaaaagagatttatataagatggtatttgaatgggctataccgattttagaaaagaatgagtatgttcatcgagaggtaattcaaaagatggagcgaatgcacgcagctttcaaggaaacggtccattcattaccgagacaaattattcatcgtgatatgcatctatcaaatgtaatctttaaagatgataaactggaagggtttatagattttgagattttagaaaataatgtaaaaatattcgatctatgttattgctgtacaagtgtattaagcgagctatttagtaatgaaagattaagagggaaatggttacatatcgtttgcaaagtctttgaaggttattataaacaaaatgatttaacgaaagaagaactaaaagctatttggtatgttatgctttcaattcaaattatctttattgcttattttgtccagttaccagatttattaaagttaaatgaagaaatgttcttctggatttttgctaataaggaagctattgaagaagttatagaatgtatcgtaaaggtatgaaaaaaataatattaattggttctggtggttcaggaaaatctacattagcaaggcagttaggaaataaattaaatattaaggtgcatcatcttgatgcattattttggaaaccgaattgggaaggtgttccgagagaagaacaaatagcagttcaaaataacttaattaaagatgagaagtggattattgatgggaattatggcgggacgatggatatcagactgaatgcagctgatacaattatcttccttgatattcatagaacaatttgtatttatcgtgcgtttaaaagaattgtaaaataccggaataaaacaagaccagatatgggcgcgggatgtgaagaaagatttgatttgcaattttttaaatggatatggaaatatcctaatgctaaacgacctacaattttaaaagggttagagcaattgtccgaagagaaaaaggttattgttttaaaatctccaaatgaggttcggaaatttttagagcacatataataatacaatgtgacacaacaattctttttggatcttaccgattagtttaattaaactaatcgttttttattatgaaaaatttaacgctttttgaaaattgtattttgtaatgagtatatgactataaattcatataaaatgaacgtttggaggaatagaaaatgactaatgatttaattcaaacaatcgattcattaatggtaaatattccagctggagaggtagtattaagagatgatcgaataaaaaaagaatggctagtgcaaattcaaccatttcttcttgcgaagtatgctgtaacaatggaactatatgatgctattacaaatagtccattaaataattttgataaaaatcataaaccagttgtcaatatttcatggaacgatgccattgcgttttgtaatgtactttcaaaaaaagcgggattaaaagaatattattctattagtgatggtggtcaaattgtgaaatgtaatttagattcaaatggctaccgattaccatgtgaggcagagtggcaatatgcatgtaaagcaagtacaaccggatatacatacgggaaacttcatgatatagcgtggtataatgaaaattcaaatggagagattcatgacgttggccaaaaagaaccgaatgcatggggactttatgatatgctagggaacgtttgggaatggtgttatgatttgtatgatgaaacagtgtacggatcatatcgcatttttcgtggtggtagttgggctgaaacagcgagagggtgcggcgctacttgtcgtcgtcgaagccatcctacatttcatatagatgatctcggttttagactcgctaggtcaatttagtaggaacatgctacgaacaactaagaaaagagtatggagaaaatccgtactcttgccaacatagaaacgatttaacgtaaggagtgtttattatggcgcgtgttttatttattaacgctggatcagaaggacatataaatccaactttacaagttgtagaagaattgatttctcgtggtgaagaggtcgtttatttttcaatagaagctttcagggatcggattgagaagacaggtgctactgtacgaacgattgatgatcaaaaatttataaaagcgtttctatctggaggcagaaattatttacaggaaagaataaacggccttctacatacagcggatattgtaatatctagcgttctagaacaaattgaaggtgaacattttgattacatgattcatgattctatgtttggttgtggccatttaattgctcaaattcttaaacttccagccataaattcatgcacatcttttgcgcaggatgaaaaatcctttgagcaaatgttaggtcatctgtcaaaaaatatcccagtagaaattcatgataaaatacagaatgattttcaaaacttaacgaagggaattgctgaaaaatatggtgttgaaataaaatcatcgtatgaagttttctgtaatcctgcacctcttactattgtgtatacaattaaggagtttcagccttttggtgatacgtttgatgaaacatataaatttgtaggaccatctatctctgcacaaatgaaaaacagagacgttgattttacttcaattgaagaaaaaagtccgatttatatttcattaggtactgtttttaatgaagcgattgacttttataaactgtgtatgaaggcctttgagaatagtgagcatacaattgttatgtctattggtaataaaacaaaaataagtgatctaggcgaaatccctaaaaacttcattgtgaaaaactatgtgcctcaaaccgaactgcttacttatacgaaactatttattacacacggcgggatgaacagtacgcatgaaggattatataacggggttccgctcgttgtaataccgcaaagtgcagatcagccagcaattgcaaagcaagtggagagtcttggagcaggagttcaattacatatgaatgaattaaccgtggagaaattgcgtgaaagtgtggagttaattttaaataacccttcatataaagaggctgctttgaatttgaaggaatcattccgaacatcgggtggatataaagaagctgttgatgaaatctttacatttgtaggtcagtaataaatataaagttatacatgaaaaaagtgtctatattaaatgatatagacacttttctgttgtaagaagagaagaattgtttaaatggaaaaaatgaaaatactaaatgtgaattttgagaactaagtctacaatttctgctgcacacttttattttatcccgtattaaccgaccgtaaaaccccaactaattaaagttttactttatgatttcaggatgtggttttatatgttagtaataatttcactgtttctgcacaacttctgcacatgcttaggcgagttctatgtcatgatatattcataaagtgaaatatttcacaaggaaaaaatatattttcactgcggtgtatgcataattaacacatacatcggtacaagtttgtctcttgttattcttttacatcaaagcccacattccactacaaagtataacaagaaggggacatgaacatgaataatcgatttttaaaacaactacaaaatatgaaaatgaacaaaaaaagtttaggagttgtagcattaacagctggaattattagtacgacacttattcctcaaaatgcttatgcgcacggttttgttgaaaagcccggtagccgatccgctttatgtagtccaacttatggtgcgctaaatgtaaactgtggaagtgttatgtatgaaccacaaagtttagaagctccaaaagggttcccacaaggtggtccagtagatggacaaattgcttcagcaggcggaaaatttggtggtattttagatcaacaaacagaaaatcgttggtttaaaaatacaatcactggtggggaaaatacatttacttggaagtatactgcgcctcacttaacgagtaagtggcattactatattactaaaaaaggatggaatccaaataaagcgctaacaagagcagatttcgaaccaattggaactgtacaacatgatggttctgcagcttcaaataatttaactcataaaatcaatgtacctactgatcgtagtggatatcatgtgattttagcagtatgggatgtagctgatacagcaaatgcattctataatgtaattgatgttaatcttattaatgatgtgaaaccagacatagaagcaccaagtattccaaatggacttcagacgcaaaaagtaacagcgaatagtgtagaactaacatggaacgcttctacggataatgtaggggtaaaaggatatcaaatcttccgtaacggagagatgattgatacagtaccagggactcattttattgataagaagttacaaccaagtacagaatactcttatactgtaaaagcaattgacgcagctggcaatgtatcgacagaaagtacagcgcttacagtaaaaacgacagttgagactcctgatacagaagcaccaacacaaccaaaaggattacatagtatgggaacgacagcgtcaagtgtggatttaatgtggagtccatctgacgataatattggtgtagaccattatgatatttatagagaaacagaaggatcaatgaaaaagattgcaacatccaatacaacttcttatttggataaaaatctgctcgctaatactacttataaatatgtagtgaaagctgttgatgtagctggaaatgaatccgtacagagtgatatattcacaattactacaaaaaccgaaagcgcttcatatgaagcgtgggatgcaaaaaaagcatataaaaagggagatagagttctacacgaaggaaaagtatatgaagcagtccagagttatcaaggaaatggtgatccaaactggatatatgcattatcattatggaaaacagtgtaagctttacttaggtatgaactaagagatgatgggctttgatgcaaaaggtaatcttgagaattcacttttctattaataaaaaagggtagtgtatgaatacataagattcatatactaccctttttattatgataacattttcgtcataagtatgtgcggaatgccatcttccataaatatatcagaagaagtttcatagtctaattttttataaaatccttcagcttgtgtttgaccgtgtagtttcactttcgtaacttgttcgttacgagcaagttcttctaacgtttgaatgatgactttacctaatccgtatgtacgataatcttttaaaatacaaatacgttctaattttccgacaccatcaacaaatcgtatacgacctgtgcctacaggaagttcatgataataaactaaaatatgtttacattgctctccgatttcatcgaatgtatcgaattcatctgcaagagggacaccttgttcttttacaaatacttcttttcgaatatgaaaggcagtttctaaatcagcaagttctgttataagtttggattgcaaaatgttcagtcctttctagtgtaatcagtttgcgttttcctagtatatcataataaagcactattaagagaagaagaacatactaaaaagccaactttaaaaagttagcttttattacaatttctttatcccatttttagtaccaataattgctgtactcgtcatacttataaacaaccctgtttcaactacaccagtaatcatttttaattgggtgtgtaaatgggcaggattagaaatatgattagggaatatacaatcgataatcaggttattgttatcggttatataagtttcatcatttttcaaacgtaacgttgtttgacaccctaaagactgaattttattttcggtttgtttccatgaaaaagggatgatttcaacaggtaatggaaaattacctaaatgtgttacaaatttcgattcatcagcaatgataattagttctttagaggaagaggcaacgattttttcacgaagtaatgcaccaccaccgccttttataagttgtaaatttgaatcaatttcatccgctccatcaattgtaagatcaaggctttgtacgtcgtttaacgaaattagggggatatttagttgctgtgctaatgcttcagtttcctttgatgttggtacagcttgaaatgataatccttcttttacacgttcacctaatttttgtattgtccaatatacagtagaacctgtaccaagcccaattttcatgccatcatttacaaagttagcagcatattcgccagcgagctgttttaaattcatcactttactccgccgggcgtggcccagcatcaagacctgaattttcaactgtaagtaccggacgaacgactatatctttatgtacacgcatttgacaagataatcgtaaatgatcttcaattcctttttccgtcattgcatgtttctcattcgcactcgcttcacagaaatcacctgctagtatttctactctacaagttgtacaacgtgcattcccgccgcaacgatgaagaatgttgacaccgctatcttcaattgctaatactaactttgttccttctttcacatcaaaagttcccgcaccttcaattgttaattttggcaaatttgttcctcctcacgtaaaattgtacataacatatttatgaccgcgaattattgaacataaacattatttttttatatccccgtaactttttttaatgttgaatcgtttattaagtaagcgctgaaaaggagtggttattttgtgcacaaaagtaactcatgttttaaagaatcatatcgatatgaatcattcaaatataaactttttaattgaacaatatggagagttaaaaagatactgtacttttttaacgaaaaacaaatgggatggggaagatctcgcccaagaaacagtgtgtaaagtgcttcgaaaatatagaaataaagatatttgtatgacactcgtctataaaatagcaagaaatcgttggttagatcagatgaagtctaagtctgttcatgaaaaaataagaggacaaatcacttttgaagaaccacatgagaacattgcagatttgcatgaaatggtagggaaagtattgtcttcattaaatgtacagcaatccgcaattttattattaaaagatgtttttcaatatagtatcgctgatattgctaaagtgtgttctgtatcagaaggtgcagtgaaagcttctttatttcggagtagaaataggctgaaaactgtaagtgaagaagggattgagatagtcgaattcacagaggatattgaagttgttgtaacatctattcgtgaggaaagaccagaattattaacgaagcttcttccgacaatagattttactaaattaccatctaaacagccagtcttattatttaatgtgaaaaacccttcttcctacagttatatgctttacgcagcataacaagtattggagggatttaaaatgaatgcaattccatatgtagtagaacaaacaaaattaggagaacgttcctatgatatatattcaaggttattaaaagaccgcattattattatcggctcagaaattaatgatcaagtagcgagtagtgtcgtagcgcaattattatttttagaagcagaagatgcagaaaaagatatattcttatacatcaatagccctggcggttcaacgacagcaggttttgcaatattagatacgatgaatttaattaaaccagatgtgcaaacgctatgcatgggctttgcggcatcattcggtgcattgttattattatcaggagcaaaaggaaaacggtttgctctccctaacagtgaaattatgattcatcagccgcttggtggtgcacaagggcaagcaacagaaattgaaataactgcgaaaagaatattaaagttaaagcatgatattaataaaatgattgcagaaaaaacggggcaaccgattgaaagagtagcacatgatacagaaagagattattttatgactgcagaagaagcgaaggcatatgggattgtagatgacgttgttacgaaaaaataagttgaaaacaggctagaggatatcctaaccctctagcctatttttattaatcttttatccattcattaactagcgcttgattcttcttaatccattttcgcgccgcttcttcgggatctttcgttttatttaactcgaccattaatgtaccaagctgttcatcgttcatcttccatttgtcaaagtattttatgatatccggatggtctttttcgaaacctttacgaacagagtaataaatgtcatctttttcaccatatactttcttagggtcttttaaatattttaagtcaaattctgaaaagccccaatgcggattccaaagcgtaacagcgattggtttctttttcgtatatgctttctttagttcactcatcatcgcagcttcagaggattggacaagttttagttttatatcatattctttcattgctttattcgttaaattcataagactactaccgggttcgataccgacaattttattctctagttcatctttatgagcatttaaatcttcgatactgtttatgtttttcatataagaagggacgactaaacctagtccagtaccttcgtaccattttgattttaagacaatatcatctttataacgatcgtttagcggtttatctgtaactggtagccatacttctaaattcgcatcaacatcaccacgagcgacaccagtccaaattgcggctttttctaaatacatgagctcaactttgtagcctttttcttctaataaaactttccacatgtttgcggttgcaatattttctttccaacttgttacaccaagtttaatttttcctttcgaatttgcatttgttgcattacatgaagtgaaaatcatagtaataaataatgcaaggcatataaaccaaattttctttcgcatcgaaaacctcctaagtaacgtttgccttataaaataaatgtataagtaagcattcttattatgaacggaaacgagaattttaaagaaatcttatgaatgtcatttttatgtaatatttctttgtaaaatcgcaacactatgtgaatagatgggtagaaaaggagtagtgacatggataatacaaaggtgcgtgttgaaaacgtaacaaaagtattcgggaaacatccgcaaagggccctttccttattaaaagaaggaaaaagtaaatcggaaattttaaaagagacaggaatgaacgttggggtgaaaaaagcaacgtttgaagtttactctggagagattttcgttattatgggtttgtctggtagcgggaaatctacgctagttcgtatgttaaatcaattgattaaaccaactgcaggtcatatatacatagatggtgaagacatcgcaacgatgggaaaagaagagttacggagagtaagaagaacgaaaatgagtatggtatttcagaaattcgctctatttccgcatcgtacagttatacaaaatgttgcatatggtttagaaatacaaggagttccggttgaagagcgagagaaaaaagcgttagaatcgctacagttagtaggactcgatcatcataaagataattacccaagtcaacttagtggtggtatgcaacagcgcgttggaatcgcaagggcactaacgaataatccagatgtattactaatggacgagtcattcagtgcattagatccacttattcgaaaagaaatgcaagatgaattgttagagttacaagataaaatggaaaaaacgattatatttattacgcatgatttagatgaagcgcttcgaattggagatcgtatcgcattaatgaaagatggagaaatcgtccaaattggaacaccagaagaaattatgatgagccccgctaatgaatttgtagaaaagtttgttgcggatgtgaatttaggaaaagtaattacggcggagtctattttaaaacgaccagaaactttattaattgatcgtggacctcgtgtagcccttcaaattatgaggaatgcaggtgtttcaactgtatatgttgtaaacaaaaagtatgagtttttaggtatattaactgcggatgatgcgagtaaagcagtacaaaaacagtggccgattgctgatttattacttaatgatattccgcatgtgtatttggatactttactggaagagacatatgcaaaaatggcagagatgaaatatccgttaccagtaatcgatgagaagaaaaggctaagaggaattattaaacgtgaaagtgtcattcaagctcttgcaggaaacattgaggaagaggtgaaagacgatgaatagtataccgcggattccattaggggaatgggtcgactcatttgttgcaagtttatatgagcactttgaaggcttattccgaggattctcttatattattggcggatttgttgatttactcactaattttttaacaataatacccgccatattgatgattattatcttatgtttcctcatttggtacacaacgaggaaattatctttagtcatttttacgcttattggattattatttattttgaatattaactactgggcacaaacaatgcaaacattagcactcgtacttacgtctgttattatttcaattattgtcggaattccaattggtatattagcatctcaaaatgaacgtttctcaaaatttttaaaaccaacattagattttatgcaaacaatgcctgcattcgtataccttattccagcgattacatttttcggagtaggtgtagtacctggaattattgcatcagtaatctttgcaatgccaccgacaattcgttttactgacttaggaattagacaagttccagaagatttaattgaagcagcgaatgcatttggatccacagcatcacaaaaactatttaaagtacaattaccacttgcaaccggaacgattatggctggtgtgaaccaaagcattatgctttcgttatcgatggttgtaacagcatcacttgtaggagctccaggacttggagttgatgtatatcgctctgtaacacaagttaatatcggaatgggatttgaagctggattagctatcgtagtaatcgcaattatattagatcgaattacacaagggttccatacgaaaagaaaataatgaataaaaaacacacttttataatacaaagtgtgttttttattgcatccagatcacatacgaacgataacagaacctccagctggtgcacaaacttggtttttttgttgttccattgatttaattaattgattattttcctcgattaatgagattaatttagttaattgattttcaagacttgcaatacgctgcatcatatattgtgaatcatgatgcaatgtattccttgcgggatgaggggaataaacatactgttgatttatatttggattccaatgaggatacatttgaatcgttcctccttcaataaattacgaagctttcttatagtaaatgcctatgtataattaatagttacttgaaaattttccaatataaaaggagtatgtacagaaaatggaaaatattatatgtaaagttacagtacattttttggaaatatttaagcgagatagtccttatattaatacattcaagtaaatgtatgttatttagggagaaatgatgggaggagatgtaattttggctaaaaataaaaaaagaaatgatgctttggcaataggtgtcggtataggagttgtaattggtgtatttcaagggcactttacaaataatttagtaatcggaattgtgattgggattataattgggattgcgtttttgaagaaataatgagatgtaaattcatttcaaaaattgttgtatcaaaagaatgaaaattcggaatactaaacctgtttttcctttttttgtgatattatatatgaaaaggaaggtgatggatatgtcaacaaacaatcaaatagaacaaaactgtttcatttgcaaaaaacatataggaaatattatagttccaggtggagctatttacgaagatgaactcgtttacgttggacatgtccactgggatagtgaagaaacatacctgggttatgtaatgatagatataaaaagacatgtacctggccttgctgaactaacagatgaagaagcgaaagcgttcggacttataacaagtagagtaagtaaagcgttaaaagaaagcgaaggtgcagagcatatttacacttttgtttcaggaaatggtgtaccacatatgcatatgcacattattccgcgttatccgaatacaccaaaagagttttggtcaccaaccgagatagcgaaatggactggcgcaccatatggtgacgaagagaaaataaaaaaactatgtgaaagaatacgaaagtatatggtaaatgagtatgcatacaaaaaataatacacaatattcatgggttggaaatatagaaatgtgtttaggagaaatttcagttaaacaatatggtgatattgtacttggtaaatatggtgggaatataagtgctggagcgaaaaagaatgaagatggtgcattagtttggtcaaatggtgaatgggaatttgcagctattctagatggacataatagtgcggaaagtgttgagttagtagtaaatacaatcgaaaaagaatatgaaaatataaaagtaattttgaatgaaccaattaatacagtgtttcagtctgttgaaaatcatatacttacaatttttcagtcatcttcatttaaggaaaagtgcaaaaaaattaaaggtgaaacagcttgcttactatgtgtaaggaaagaaaattatatatggtggctttctatcggtgattgtttagtgtatgtatttcatgaagagttacataagttaggacaatatgcattaaatcaacgtcatttttacgaatggattggaaatgtaaacacatttgatttacctgttccttgctattcatcaggtattcgtgaattacgtactggaaagaaccgaattgtaatggtgacagatggagtattagaatgcggggagcgccgatatgaaatacctttaaatttgcatattgctatgcacagaaatgataaaacacttaaagaaaatattcacaatgttttagaacacgtgcatcatcagttgggacgtgatagtgcgacaattattagttgggacgtagaaaataaaaggaatgctacgtatccgagtgatcagccggagaaaaggtaaaggaggaaacatcactgttttgggttaaaggaattttattaatagtatggattatatccttagttgtttttgaaaaagtagtgaggaaaaaactaaatataccgaaacaaacagactggaatagtaaatatgtaaacaactttcataaatggggcactagggctcttattatttcttatataatttttacgatgatatgtgctactttaaatcccgtttatattagtaatttacccattttatttttaataactttatactgctttcaatcatttatggagtggaaatttgataaagaatcgagggaatatgtcatttctttaggaacggttccgctattagtaataacaggaattattcttaattttttcttttatacctattggatttaatcatatgtggaatgaatggggagacaaaatgaaaaatcctaaattacgtgctgaagcaatgattttaaatgaagatcattctaaagtacttgtacaatgcaatgaaaatgaatcattttatcgttttccaggtggctctattgaatttggtgaaacgtcaaaagaagcaataattcgagagttaatagaagaatacgatttgaaagttgatgttcaagagttagcaattgtaaatgaacacatttttgagtgggacaacgaaaaaggtcatcattgtacattgatacattgggggactgttgaaaaaatcattacaaatgaaataaggcataaagagcatgaggatattatattaatttggaaaagtctagaggaattacaggagaagccgacatatcctgaaggcatcataagttatttagaaggggataaccgtaatatagtccaatttatttcaagtaattaaatgaaataataggaggggggaaaatgggaggttctactttttggattataactattgttttttgtatagctgtctattttctcgataagtttttaagaaaaaaattgaatatgcccaagggtggtttttggggatataaaaaacatgtaaatagtttacataaaaaattggaaataggactactttttatttatttaataactagctttatgtttatctttaaatttgaaagtattaatattgcttatgtcatttttacttatttaggtgggacgttaatcttaagagcattgatggaatggaagtatgatagagagtcgaaagaatatatattttcggtaattggggtattcacgtttatttttatgacttcgatactattttacttctttccacctgctgtataataaaaatttgatagtacaaataatgaaataactaataaacaagaaaccatttactactaaatggtttcttgtttatttaagcatttattttagttaatatagatgtaatgaaattagttttatcctctgcatacttatgtttatcagtaggattagcttgtgaaagttgaatctttaactgttcatactgcatgcgtgcagttttattgtctattaagtaatcacgaaattgtaattgttctattaaatatgtattcccttgttcatacatatgaatttgatgagttcttggttcacctttattaaaatagtatctttcgggtaatacttcttttctatatttatagtttagtagttctaactttttaatacaatgtataccgtccgtataattttctaattcaattgctatatcaataattggctttgcacttaaatatggaatagaagtactaccaatatggtgtattgctaaaatatgttcgccaatttgttcctcaatgagttgtttctctttcataaactcaatttcccattcttcagtccacggcactaaaaacactttcccatacggtaaacctaacatttaattagcatccctttcaaaatagttttcaaaaagtttattacattttcttaaagcttctcaaaacaaggtgttcccacaatctccaaggaagaatcttcttcgcaaagatcataaatttcacacctttaccgattggatatcgtaaatttgtacgcttagattcagcaatttctgcaattttattagcaacatctatcggattaccaaatgtatcactgccgctattaatatgtttttgtattttatccatatactctttgtaaggagatgttgtatcagattggttttcagcgagttgtttcccaacctcccatatgtttgtgttataagaacctggttcaattaaagcaacatctattccgaaaggttttacttctaagcgaagtgattcactccagccttctaatgcatattttgaagatacataaggagataaaccagggaatccaacttggccgctaatgctgctaatattaatgatttttccacttctttgttttctcatatacggtaagacaagctgagtaattgatatagccccaaataggttcgtttcaaattgtttgcggtattcctctactggaatttcttctacaaagcccccatttgcatatcctgcgttattaataagtaggtctactctgtttattgcttttatatataattgaaagttatgtatagaattttgatctgttacatctaattgttgaacttttatattttgctgtaagttgagttcagtaacttgagatagtaaggttccttgtttttctaggtttcgcattgtagcaatgactaaatagtcttttttcgcaagttcaagcgttgctaataggccgaatccacttgaagccccagtaataattgcaatttttttattcattgtcggctcgctttctttttcttttatcataacgagatataaaggtaaaagctatttattgtataaagatatttgttataattgaaaatgattatcaattgattgtaatttgtatataaaaggagtgtggatttcatgaagactaacagttttcatgatatttttagtaaatattttcatgggttacaagttgtagaagaaagatatatgtatgtgccaaaaacaataggtatgggtgaagtgcgaaggtggagctcgttttctggaatggaaatagtgctatcaaattaccagttccataaaaaccatcgcattcaatttgcatcggatgcagcaatggtggaacttaatttttgtttacaaggatccggggaagtacaagttggttactctacaaataaattaatggctgggaatagctatttatactttatgaatgactttgaagttctatttgaatatgaaaaagaaactccactatattcattagcaattggaattcctgtacagttgtttaatcatttcatgctaaattgtgctattgaaaaaagtcatgattttcatactataataggaaatcaatcttttaaaaagtttcaaacccccattgatgccctaacatctaatattattaagagaatgttagagaatccccaaaaggatcgtattaatcaactcgaaatagaaagtaaagcgctcgaattgctttctatatactttgggaaagtattactgaatgatcgtgatgcaaataaaaggagccaattatccaaaaaggatttaaataaaataaaacaagctgaagaaattttacttcaaagaatggagtcaccccatgcccatcaacttaaggatagaaactctacggttttccattaattgaaatgaacaaacttttaaacagtataaaacggaaccggaggaaacccaggaggcggaacgggaacagacaacggaaccggaggaaacccaggaggcggaacgggaacagacaacggaaccggaggaaacccaggaggcggaacgggaacagacaacggaaccggaggaaatccaggaggcgaaacgggaacagataacggtaaagttactgaaagtacaacgaatcaagtagtacatcaaaaagcagaagtattaacaaaaaatatatctagtgtattaataaaagaagcagtagatacagtcgaaagttatcaaggtttaatgagcctttacgaaatgtattatgggattgatttaagaacgaaagatgtaggtcctaagttagaagagggaagtttagatgcaattgcgacggatcaatctttgtactacgtattaaataaacaaagtttaattgatttaatttcaaatcttgtttcatcaagtattactacagaaataaagcaagatatgtcaggtttaaaacaaaaaaataaactcttatcaacaatctattactagtgcggatcaaaattctatgctactagcggagaaattaaatggaacgacgcaacaagcaactagtatgaatgaaaatttaggagagtatgtaaaaggtttagcgaaatggcgtgagaatagcttaaagctagttgaagagcagcaagtattaacaacaaatcatgctggtgagcaaacagctattttatcgttagattctggtattaaatcattaatgatgcaaagtcagtcattggtcgaaagttcgaagcatagtttagcaacttcagacgatgtatataaaacatttgatcaaattaatggacaagcaaaagaaattcaagacagcggaacgacaattgtttcaaaagctgatctattattaaatgactttacgaagaaaatggaagatgataaatcattctccaaaaactttacgaaaattttagcgaatagccgtattggagatcgtcaaaatgagatgctatatgactttttagctagtccagttcaaaagcaaaatgatggagtaattgcagcaggtaatgcttttacaccgtacttaattgtattaacttgtttcattgttgcattatttacagcatacgcaattgcgaatcaagaaaagaaacgaatgcaatcagatcattttgaagagaaattctcattaattgatatgaatgtaccaactacagtagtagctttcggtatatcaattgtggaagggattagtataggtatcatttctgggcgtcttttaaagttcggtcaggatcaaagtttactatggattgcgttcatcacatttattatgatggcgtttgtattggtctcaacctacttattacgacaaataaaaatggtaggaatgtttatactattagtatttttaagcatgtacctatttttaactgaggcagttggaagtaaagtagatcaaatgtcgtctgtcggaaagatacgtcaattctcaccgcttcagtatatagaaagttttctaaatgattttattagtggtaaagatactgggaaagttatttttgtcgtattgtttgtaattgccattattggattggttagtaatctatttgtatggcataagaaatgggaggaaaaagaagtaaatgatcaaacaatggagcatagtggctaagttatcatttctctctatccttttactgtttgtcgcgctaccgataaggagcgcggctgacagttatcttggtgatgatgggaagattaagtttaaagtggatcgacttgaagaaagcgaccaagaaaaaaataaaaaggaacataaggaaacagaattagataaagcatcgattgagttatttaacaaagatatagaggaagaaattgagaaaaagaaaaagaaagaacaaaaagatatggaagctttgcgagattctctttttacaaaaccaaaagagaataatagtgttaaagatacgaaaaatagtttatttagcagtgaatacattgtcagaaaaagtgcagatgaagtagcgagtaatgaaacaatgaatgaagagccaattagtataacaataatattattatttggcggcggcattctacttatttgcatcggtatttatacggttcttcgtaaaagttggaggtaaagtgatggcaatacaaacacatatcaatgtgacagtagattttagtaaatggaatggaaatacatatgatttgcgtattccgaatcatcaatctattaaatatttattaaaaaacttattagatacgctaaagattgataatcatgaaggttcacattttgtaattaaagtgaaaaataagtcaattgttttaacagataatgatcgtttaattgatcaccaaataacagatggagatattttgcaagttttataaagaatattttttacttttagttatttgaaaataagttattacgggttataaagaaaaggagaagaggataaacatgacggaaaaaataattcaaattgatgcaatgaactatcaatttcaaatagaaaaagaaaattggaaattggagatgaccaaatctcaaacacgtataaaagacttccgtcaattcgatataattacgggcgaatcatctgaatttgtactattaacaatagaagaaacggatgatatgtttacgtttctatatcaagtagataaaaaattatataagtgggacgatcttagccgttttggaagaaatgagaaattaagactacttcggaatgttgcgcagtttcgtaaatatttaaataaacgaatcacgttctttttacatccagacaatatagtttttaatgctaatttaataccaagtattatacatagaggaattcgagatattgttccgccaaccccattattagaagagcaatttttaacacaatataagtgtctaattattgctttattctcccaaaaacataactttgatgatttgtatgctgggttactaaaagatgcaaaagaaacaacatttgaacagaccgttgctcaaatggaaagcttagatgcattactgcagtttcttgatgacagctttgagaaggaacaaacaaaaacagaaaaaaatatgcagttagtacctaaaaaaagctataaatcatttaaatacttagctttttccttcatagcggcgacagttattttagctgctcctttaatatatttcacttttataaaatttccttatcaaaataaattgttagaagcaaatgcaagtttcatagcaactgattatgacaaagtcattacgcaattgaatgaagaggagtttgaatcattaccgattgcatctaaatatgagttagcatttgcatacattacagctgaaaaactaggtgaagctcaaaagaaatcgattatgaaaaacattagtttgaaaagtgatgaaaagtatttgctgtattggatgtataacggaaaaggtaattttgataaatcattagatttagctaagacacttgatgatcctcagcttattatgtacggccttgttaaacaaattgaatcactgaaaaataatccggatttatcaggggaagaacgtgatcaaaagttaaaaacatatgagcaacaattagatgaatataaaaagaaatatggcaattcatcaaacgataaaaatttgtcggacacagagaaaaaagagtaagcacttgatgagacagttgaaaaggagcagtgaacacggatggagcaactattagtattgacttatggagacaaaatatataagtgcacattacatccaaatgagcaatcaatagtgtcgattggaaaagagtggacaaatgatattacgaatccaagtttagaacaagaagtagagttaaagtggaataatgaagtaaatgcttggatggtacaggatcaattaatagaattcaataaggaaattgagattgggaaaacaagagatgtgagcttgaaaatctttatatctattgttggcacaactaaagtgtttgatattggaacgaaacattctcttacagtgagtcaaaacgattacgatgatatttctattaccgggactagtgtagatttaatgctatctcgcgaaacgttgtacgattcttttaaagtgaacgtgtatggcggggatgtatttcataattatacgaagttaaaagatagcgttatgttggaatcaggagacgtattatattttgatggtattttattggagattggtagtgaagacattcaagtactttcttcagaagataaagtgaaatctgcgttacctattttagtagaatcagaaacgaattatcaaagtggttatccagactatcatcgttcaccacgtattatttaccgtgaaccagaagagaaaatgacaattgcaaagccttcaagtatgccatcaaaaccaacggagcatttagcaagaatcattgcaccttcacttgtcatgattgtcgtaactgtattacttgctattttcatgaaatatggaatgtttattatcgcatcgattgcgatgacattagtaacaatcattgtttctgtcacatcgtatattaaaaatttgaagcaatataaagtcgacattgttgaacgagataaaagctatagagagtatataaaacaaaaaacgaaagatttacatgcagaaagtgaaaaacagcgtcacgcattacattatcacaatccaaatgtagaagtaatacgtaatatggcagttcaagtaaatcctagaatttatgaaaaaacaatgttacatcatgatttcttaacatttagcgttggaacaggacaagctaatacgagttttgaaattcaatttaatgaagaagaatttagtcaaacgaaagatgaattaatcgatatagcacgtgaactaagacagcgttatctatcattggaagatgtaccagttgtaacagatttaatgaatggaccagtcggttatattggccaacgctctttagtgttagagcaattacaattattagttgcacaaacggctttattccatagttattatgacttgcagtttattactatttttccggaagaagaaaaagaaaaatgggattggatgcgctggttacctcatggaagtgttcgcgatataaatgtacgtggatttgtataccatgatcgtagccgtgatcaagtgttaaatagtttgtatcaaatattgaaagaacgaaaattaaaactagatgaaaaaagttctactaatgaaaaaatgtactttgcaccgcactatgtcgttctcattacagatgaaaaactaatattagaccatgttgttatggaattctttaatgatgatccgagtcaattaggtgtatcacttgtatttgtacaagatgttatgcaaagtttaccggagcatgtgaaaacggtaatagatataagagatgcaaaacaagggaacatcatcttagagcaaggagagcttgttaaccgtcaatttaaactaaatcacgtaccgaaagggttcaatttagaagatatttcacgggcattagcaccattaaatcatttgcaaaacttaaaaaatagtattccagaaagcgtaacatttttagaaatgtacggcgttgaaaaagtaaaagaactgaatatcacaagtcgttgggagaaaaatgcagcgcataaatctttagctgtaccacttggattacgtggtaaagaagatatcgtaaacttaaacttacacgaaaaagcacacggaccacacggattaatagcaggtacaaccggttcaggtaaatcggaaattatacaatcgtatattttatctctagcagtcaatttccacccgtacgaagtagcctttttactaattgactataaaggcggcggaatggcgaatttattcaaaaacttaccgcatttattaggaacaattacgaacttagatggagcacaaagtatgagagcgctcgcatcaattaaagctgaattgcaaaaaagacaacgcttatttggggaaaatgatgtaaaccatattaatcagtatcaaaaactgtataaagaaggcttagtaagtgaaccgatgccgcatctatttttaattagtgatgaattcgcggaactgaagtcagaacaaccagaatttatgaaagagttagtttcaacagcgcgtatcggtcgttcgctcggaatccatttaatattagctacgcaaaaaccgagtggtgttgtagatgatcaaatttggagtaactcgaaattcaaactagcattaaaagtgcaaaatacatcagatagtaatgaaattttaaaaacaccagatgctgctgaaattacattaccaggacgtgcttacttacaagttgggaataatgaaatttatgaactattccaatcagcttggagcggagcagactatgtagaaaacaaagaggataaagaacatttagacgcaacaatctatgcaataaatgatctaggacaatatgaaatattaagtgaagacttaagtggacttggtagcagtaaagaagtaataagcgtaccatctgaactggatgctgttattgactacattcacgattacgcagaaataaatgaaattgaagcgttagctagaccgtggttaccaccacttccagaaagcgtatatttacaagacttacacgctattcagttcaaagaagcatggacgaaagaaaagaaaccattacaagcaacagttggtctactagatcagcctgaattacaatcacaaacaccattaacattagatattagtaaagacggacacgtagcggtcttctcaagtccaggctacggaaaatcaacattcttacaatcagtcattatggatgtagctcgccagcatagtccggagcatttgcatgtgtatttagtggaccttggaacaaatggtcttctacctttaaaaggattacctcatgtagcggatacgattacgattgatgaatctgaaaaatgtttaaagtttgttgaaagattaactcaagaaatgaaaaatcgtaaacgattattaagtgaatatgacgttgcaaatattgaaatgtatgaaaaggcaagtgggaaagaaataccacatattattattgcgatcgacaattatgatgcagtaaaagaagcgaagttctatgaaagctttgaaatgctaattatgcaaattgtccgagatggtgcaagtttaggaattcataccttaattagtgcagggcgacaaaatgcacttagaattcaattgtacaataatattaaaattcaaacttgtctatatatgattgatcaaagtgaagtagctagtattgtagggagatctgatataaaagtggaagaaacagcaggaagagcgttaataaaactagaatctcctacattattccaggttgcattacctacgaaagcagaagatgaattacagcaaattcaattattacaacaagaagcaaatgatatggaccgagaatgggatggagaacgtccgaaggcaattccaatgatgccagaaattattgatattgctacttatcgtaaaaataaagaggttacaaaagccctacaagcagcaagaattccaatggggcttgattttgcaaacgtagaagttgtagctcatgatattgcagggaatgatcatttaatgatttatagtgtagatgatagtatgagaaaacaaattgtatctagcatcctatctcaattgaataaagattattttgaaagtgtgacgttagtggatacagcagagtatagtttcgttcaatataaagataatgtgacgcactacattgtagacgaaaatgaaatcaatatgcatgcgaagtattggatggaagtaattcgcgaacgagctcttgaattagcgcaagcaagacaagaaggtagagaaattcctgcattcacaaaacaactcattatcatgacaaatgttgaagagtttagtaaatttgtttatttagaaatggaggatgcagcaactttaattgatctatctcgtacagtaggcatttactttgtattagcaggtcaccacgactacatggaccgaaatcgtgaagctctacctatgaaaatgagaagtaagctaacagcagcaattatcgcaatgccattaaatgatcaaagtatcttcaacataaaatatataagcaacgaagcgccattaggtaaagatgaagtgtattactatcaaaaagggaacataatgaaactaaaaatgcctagagtaactaacgaggtgacagtatgaaattaaagaagaaagctaaggtgatgatagtcgtgtcaatagtggcaagtttattaagtggatgtggttttggggagacaaagatagagtatgagagattagtaaaggcattggatgaaggggacatgaagactgttatgtctgcaagtgatgatgggtatgcttatgtgaaagaagaggttagggatagcacttttattgaggataataataagcaaataggagtagtttatcaaacaacgcaaggtatttatagtattaaagataatattctttttggtgaggcacaaaagaaagtcaatactccagttgaggatgaaaaacatagtgacaacccacaatataaagaagaagttgtattcaagtcagatataagatacgaaaatggacagctagaagcttcaaatcgagggaaagatatgtctaatataaaattaatgcttaatagagtgcaaggaataaaagaattgaaaccaaatgtgaataaaaaaagcttcagccaaccagctacgataagctataatttatcagaaattcaatttaaagagatatttaatgggaatttaggattagagtatgagaagtttagttatgcaacactactaattgaatttaattctgctaaggatacaaaggaaaatccgatggaaataacagagataacaatttcgataggctataaacaaagaaatgaagaaaataatatgattaggcatgatcaagaaataacaacatatttacataataaagaagaaaataatcggaaatcaaaaaaagattacttacaatatgaaaagaaatttaaagaaagccattaatatataagggggagaatatggtgaatgaggaagattataaattaagtagtgatgtaggaaaattaagattatcggcaaaagatatttatgattataatgcacaagaaaaaaaatataataattctgatccaataataaataaacagaagttacaagacaactttaatgctaatcttatagcttctgatgatattcattcagtaactggatttggggcatatgctttagaggatagaaacacgcatgaaattttcattgtatacgttggaacccaaccgagccaaataggtgatttagcaaccgatggagcaattgggctacataatttaactaattcacctatattggggtcattagcggaatttcagtatagtcaagcagaaaaattttatgaaaaagtcaaggcgaagaataaaggaaagaagataactttactagggcactccttaggtggcggagcagcgaatacagttgcattaagacatcaagaagataatataaacgtattagctttaaatcctgcgcctgttttaaataaagatgtggttaagtacggatacgggaccaatatgaaaaattgccgcagtcttataaatgaatatgatcctttgtatggcgccattaaggccgcagattttgtaatacctggacaggtttataaaatggaaaatggggaagggcattcttttttatatgatccaaaattttattctaggaatgggaatgtagcaatagataaattgaaaaaggttagcgaaacaggatttgattggaaatttggttttttagaaatatcagaatctgctggggacctatataaaggaatcactggaaaaaaaacattaagtacaacagaagaagttgtagtggatttagtggtaaatggaaccccagtcagtgcaattctagttgcaataacagtagtgggagatactagtgctctagcaacaaaaatagcaagtataggtgtagaaacaggaaaaaaagctttgaaatttagtaaggaagttatacaagaagttagaaatcaggtgaatgcggctgtggattggatagagaataaattagcaaaatgtaaggaaaaggtacttgaagtgttagaatcagtatttaacgcagctgtagattttttagtaggatgcatcattctttatttatcccgtgatgaaattatagcaattgcaaaagaagtagcatcttctcttgttcaagatattttagatgtatttaaaggtgactttgaaattgatacaaatattgcttcaattgctggagattatgtaagaagccatcgccaatcattattaaactattttatgaatgatggtagtagaggattaaatcgttcattattagtagagatttccagagatgtgaacgaactttcaaatgatttaaaagagttaagtcaagatgtaacagatgcggtaatttctatgatagcaaaagatgaagagttagcttcggtttcttattattgataaatgttaaggaagggggtatgaggatggatttacatatgataatgtcgagggttcatagtacatttccggacagtggtgggcgagatcaaattattaacgttgttatgcaacttgaaaaagcagctgtatctttgacaggagatattagaagattagaaagtagtattgataatagtttgcaaggtaaaacacgtgatgcttttattgatcgtatccgccaattagaaaaaaggcgacaaaaaatagaagagaaaattatcgtattaaaaggatcggtgaattaatatgaaagattatatggagaaagttttgcctttaggaagtgtagtgaggttgagtactgaggaagaaaaagatgtagagtatgtaattactacaagaggaatacttctcgatgaagacactttctatgattatggtggggtattacacccagtaggtttgacggcagagacatataaattattcaatgactttgatattttagaagtgaaatttgaagggtataaaaattctattgaaggaaaatttgctcataattttaaaatatggcgaaatgaatttgtaaaaacgataaagaacaaggctgaaaataataagtaacaattattaataaaacaagggctataatatatttagaaataaatagactttcctcttccaacatggaaagaggaaagtctatttttgattgaataagaatctaaatatctagtattacgtgggaacaacatgaaaaagaacgtcaagaatttatagcgaatagaaaaagaataaaataaaagttgaaataacatttgtaaataatagtcatagactgttttttatggtggaaatctatttgtgaagaaataaatcattttatcctatatgatgaaaatgggatatttcggtatttttatagttaggaaaaagttattctaaaaggagtcagttgaatgaatcatagacgcaagaaaaagaaaccgaaacaaataagaaaagaagcagttcagataaaaccgatagtagaagaataaccactaaagaagagtagcaacaagttggtttatattctcctaggtattcttcttttccaaattttatatgggctgtcttggaaggttctacaacacaagtaagcaaagggaagactttccttattatcgttttctttatcttaattgcaatagggttatctatgataggaaacaaataagggggagttcagatgtttaagaagaaggagaaaaaaagcatttacgttagactggtaaacacacaaggggaaatcattcgagagtttaattgtacagaaaaagacttgcgaaaagtaaaagaaaatggtgctgaaattcgtttggttggagataagtcatatgagatggtagcaaccgatgaacaattagaaaaactagcaagagctgaagcagaaatcgaagcggaaattaaggcatgggaagatgctttaaatgagagtttggatgaacgcgaagaaagagaagcgagacagaaggaattgaaagaaaagaataaatggagtacaaagaagaaagtaatcgtatttggactcatattctttgtatttattggattacctattatcgaagggtatcaaaatagtaaactagttgaagaaggtacatcgttaaatgcagaaattgtaggtaggcacgtagaggaggaatttatatttacacaccccacactagtagttgaggtagatggtaaaaagcataatgtatgggtaagtgaagagacatataacggagcagagtggttaggtagactaaaagtcatcaaaacaaaagatggtaaagttgagaaagaccctagatatgagggtgaagacttaattacgagttattaagcagtatgtttttagtattcgcttctctcaaattaaataacattattatttgcaaaaatcgaatccattaaaataaaaaacaaattttaaataactgtaataacctcctagcatattgttgatgggaggttatcacctttctgaagataaaattaaagctatattatctcgatacaattgtgatgacagtaacgtttttactaagtgagtgcagtttcgggggaaacaaaaatagagtatgaggaatatgcttaagtgaaagagagaagaatatttagagcttttgaggagaaagaaggctatttgaactatcaaaagcattctgattatgtacggtaattaatgtagtgatgatatacataaaagattatctaaatttagttacacaaagatgaatgtacttgaaaaattaggaatgtaatgggattttagtgaatgaaaattatttaaactgtatagaaggtgaaaaactgaatgtggaacataaaagaagaagatttagatggatttcgagtaacatgtagcagccgtttaagtcctgagggtgctttaggttttatgataggaacaatagtgtacgtttcagttatgatgttttttcttattggtactttagtaacctttggttgggactactatactagtttatttgagaaaacaattgttaaaattgaacttgtgctatatagcttgcaaataatttttttaattctatattcatttccaaaagctcgatttaaatttcaagagttccaaacgattgtcgtattattatatgcatttcaattaggtacaatattattcacagctctgattcttcctggaatgtctgattatacaatcgacggaattacattagtatatgtaggtttcttatttttaggagcagtgattgttcatattgtgacaacgattgatacgtttaaacaggcaagtgaaggtgcatttagtatgaatgaaagatcctcttccttttttagtaaaacaaaagagactatgatgaaagtggcttcaatatacgcattaatcctacttattttgatttattttcataatgattatacgtttgatacttttattggatatgtaataggtactgttttactatatacagtagccgttggtgcagcagaattccagctattggtgtactgtagattcaaatttaaatcatttaatatgacttgggaagaaaatgagagaatgcgtgggagaactcgaaaacaaaataaaaaattcaaaacgaaaagtaaataagggtgaaatagaatttaagtgtatgagaattatttaaactatatagaaggtgaaaaaactgaatgtggaatataagagaagaagatatgggtctttttgaaattgaaaatagaaatcgattaagtccggattatataagaatcttttatgggggagtttttgcatatacttctatacccatacttattatgtttttaattcttttgctaaatggtgataagatttctttaactccttttgagaagatagttgtacaaactgaagtggaattgtatgttttggagttcatttttttaatgttattcatgcctaaaaagctcgcttttaaattacagaaactccaaaccattgtgaccgtattttattcttttcagttagcaacattaccatttatggctatggtggttgaagaaatctttgattttccatgtgataataaaacactggtttatgttggtttaatacttttaggtgcaatgtgtactcacattgtagcaacgatcgatgtttttagaaaagcaaagcatggaggatataaattgaaaggaccggctgtctcgttttttactaacatgaaattatatttattaattgggatgataagttgtgtaatagttttgcttatattaattttcctaaaccttaattatgcatttgatgaaatggcaatttatgtgacacaaacaataatattatatacatttgctgtagtatcagcagaattcgtcctattggtatattgtcgctttaaatttccatcatttaatattacatgggaacaacatgaaaaggaacgccaagaatttatagcaaatagaaaaagaataagagagaaagaacaaaagcgaaacaaaaactgaaatgaaagttgtaaatgatactcgtaaacttatattgaagatagaatgaatacattattcataaattaactagtaaagggaggaatgtaagatcttgaataaagattctaaagccgtaaaaaaagaaaaaggtttttttgaaggtgtaatagcacctattattgttgggattatgtttatctttttaattctatataaaatagcagagtttctggggaagtggctcattattttgtcaataccgagctatattgttactatgtttatttttttataccagaaagaatatggaggtgtattggtttgtggaataggcttaatactaatgctatcgctgtattttgtgtttgttaaaaaaagtaaaaaaggctagtttaatatgaaatactaaaaacatttatttactttcagtttgtctacaaaaatagagttattacatgattttagaaaagatggtgtaattatatgtggaatataaaagaagaagatttaaatgaatttaaaagtacttgtaagaaccgcttaagtcccgactgggctacagggtttatgtttggaacgatgttttttatttcattaataatgttttttcttattgtagggttaataaggtttggttggagttattacccgactctctttgataaaataattgttagccttgagttagtgctttatagtcttcaagtaatttttttaattatttatctgtttcctaagatgccatttaaatttcagaaactacaaacacttgtggtactgttatatgcgtttcagctaggtactattacatttacaatgttgataatcccgggaatgtcaaattattcaattgatcaaattacattaatgtatgttgggttattatttttaggtgcagtcatattacatattttagcgactattgatacttttagacaggcaagtaaaggggcatttaatacgggagaagaatcctcatcattttttagtaaaacaaagaggattgcaattaagtgtgctctaatttatgtgttaactcttctcattttaatttatgtgcataatgattatacactgaagatttttggattgtatgcgggaggaactttaataatgtacacagtagccataggtgcagcagagttccaattattagcctattgtagatttaaatttccatcattttatatttcgtgggaggagcatgaaagggaacgtcaggaattcttaaagcgttataaagagagggaggaaaagaaagcgaaagaaataaaataagttttggtttctgaaaattcgaatagaatatataagcaattgaggattgtatataaatcaatgctattaaaaattaaagcatcttcaatataatctgtacgagtaagtaaatatcagtaagtaaaggtgagatgtattactttccaaaaaggaacataatgaacttaaaaatgcctagagaaatcaacggggtgtcagtatgaagttaaagaagaaagccaagatgatgatagttctgtcaataatagcaaatttattaagtggatgtggttttggggagacgaatatagagtatgagagattagtaaaggcattggatgaaggtgatatgaagacggttatgtctgcgagtgatgatgggtatgcttatgtgaaagaagaggttagggatagcacgttttgggcggaaaatgataatcgcattagcgttgtatatcaaacaacaggaggagtatacaatattaaagaaaaaaagttctatggaacaactttgcaagaaattgctagttcattaaatagtgagcaaaaaaaagaagagattgtatatagaactagtattaaatatgaagataatcaatcaaaaagtccagatcaaaatttggatgtttcgaatgttcgatttatatttaatagattaaagggaatagatagtttaagacccaaaaaagataaaaaaagatttagtgagtcatccaaggtaacatattacttaaccgaatcggaatttcaagaaataattaatgataagttaaaggtggactacgataaatttgatgaagcaatattattaatggaatttagttcggcgaaagattcaaaagaaaatccaatggaattcactacaataagcatcacaatgggatatgaaaaaaagaataaagaaggccgattaataaggcatgatcaaaaaatagcaatctatttaaatagtaaagaagataacgataaagcttctaaaacccgatatgagaagtatgaaaaacaatattcgaatagcaagtaatgtataaaataaggggaaaggtgtagttatggtatgagtaaaaggttagttgaaaaaatagttattgtaatgactgtaacgtttttactaagcgcgtgcagtttcggggaaacaaaaatagagtatgagagattagtaaaggcattggatgaaggtgatatgaagacggttatgtctgcgagtgatgatgggtatgcatatgtgaaagaagagactagcgacagtacttatgaagaaaaagaagatggtgaacatagcaggataatatatcaaacaacccatggagtatataatgtgaaagaagacgacttatatgggaaaacaactcaaaaggttgttactgatataaaaaatgataaaaacgttggtagtaatcaaaattacaaaaaagaaacggtctatagtacaaatttaaaaaatgaaaaatcccgttcagtagcccaggatcaagctatgaatgtttcatatgtaaaattaatgtttagaggattaaatgaacttagtaaattgaaaccgagtgaagatacaaaaagatctagtgaaccgagcataataagctatgatttaactgaattacagtttaaaaacatcatgaatgataagttaaatttaaaatatgataaatttgattctgcaatattgatgattgaatttaatacgcctaataatacaaaagaaaatcaaatgagaataacacaaataacaatatcggtaaattatgaagaaaaaaaagaagataagcttataaaacgcaatcaagagatttcaacatattatcataccagggaagataataatcaaagttccaaaaaagaatatgtaaattatgaaaaagagtatataaatcaaaaataatatattttaattgaattttgagaacgataaatgttgtgaagatatgagtaaaagggtagtaaaaaatagttattgtgataacagttatgttttactgagcgcgtatagttttggtaaatcaaaatagagtatgagagtctaataaaggcattggatgaaggtgacaagaagacggttatacttaattgaaagaagaatatttggaacttttgaggaaaaagaacactacttgaaccatcaaaaggcattctgattagatgattatggtaagtaatatggtaataatatacctaaaagattatgtgaatttagttgtacaaagatttatgtacttaaaaatgttaagaatgtaatgggattttagtgaatgaaaattatttaaactgtatagaaggtgaaaaactgaatgtggaacataaaagaagaagatttagacaagtttcgaatgacatgtcaaggtcgtttaagttctgaaggtgctgcgggttttatgtttggaacaatattttatatttcaatatgtatgtttattatttttgtaggggatttgaattactacaatattttttttgacagaactattgttaaaactgaaattgtgttatttagtattcaaattatatttttaattatatatctatttccgaaagcatgttttaaatttcaaaagttacaaacgctcgttatattattatatgcgtttcagcttggaacgatattatttgtagtttcgattgtctctgaaatggctgacaattcaactggtaggatgtatacttggctactatttgtaggggcagttattattcatattgtagcaacgctagatacatttaaacaagcaagtgaaggtgcgtttagtagtggtgaaagatccacctctttttttagtaagacaaaaggagctatgattaagggggctataatatatgtattaatactacttattttgatgtattttcaaaatgattattcaattgatttttttgttatgtatggagtaggaactgttttaatgtatgcggttgcaattggagtggcagaattccaactattggcgtactgtagatttaaattcaagtcatttaatatgtcatgggcagagaatgagagaatgcgtgggagaatttgaaaacaaaataagaaattcaaaatgaaaaataaataatatattaatagaattttagtgtttgaaaaataattgaaacgtatagaaggtgaagagccaggatgtggaatataaaagaagaagatttagataagtttaggatgacatgtaatgatcgtttaagtcctgagggtgctatggttttctttattggagggatagtttatacttcagtatttatgttttttatttttatggggggggtggattattatcatacttattttgataaaacaattgttaaaactgaaattgttttatatagcttacaattcatctttttaattctatattcatttccaaaagcacgttataaatttcaaaagttccaaacgctcgttgtattattatatgcatttcaattaggtacaataacatttacagcgttagttcttcctgggatatctgattattcaattgaccgaatgactttaatttgtgtagggttattatttgtaggagcagctatcgttcatattgtgacaacaattgatacatttaaacaagcgagtgaaggtgcgtttagtaaggatgaaagatccatctcattttttagtaaaagaaaaggagatgtgatgaagtgggctacaatatatgcgctaatcctgtttattttgatatattttcataatggttatggaattgatgttttagttctttatgcggtaggtattgttttactgtatacagtagccattggagcggcagaattccaactattggtgtactgtagatttaaattcaagtcatttaatatgtcatgggaagagaatgagagaatgcgagggagaattcgaaagcgaaatacaaaatccaaatcgaaaagtaaataagagtgaaatagaattgaagtaaatggaaattatttaaactgtatagaaggtgaaatgtcaaggtgtggaatataaaagaagaagatttagataagtttaggatgacatgtaatgatcgtttaagtcctgagggggctacaggatttatgtttggaggaatactatttagttcaataaccattttttctattgttttatcagccgggtgggattactgcatgcttctctttaatataggaattgttaagttagaagtattcttatatattatacaaataattcttttcgtcatttattcatttccgatagctcaatttaaatttcaaaaactacaaacccttgtcgtattattatgttcattccaattggcaacaatagctcctattgctttgactgttactaaaatggctaataattcaattgattggattacaatactgtatgcgggtttattgcttttaggagcagtaatttttcatatcgtaacaacaatagatacatttaaattggcaagtgaaggtgcgtttagtatggatgagaggtctgcttctttctttagtaaaacaaaaggaaagatgatgaagtgggctacactatacgcagtaactattcttattttgatatattttcataacgattatgggtttgatgatttatttatgtatgtagtagggacctttttaatgtatacgatagcaatcggtgcagctgaatttcagctattagcatattgcagatttaaatttccatcatttaataaaacgtgggagcaacataaaagagagactccaagatatcgaaagaaaaataaaaaaggtaaatcgaaacgtaaggcataaagaaagtgcgtattgtacgttttgatgatagaaaagtaattatttacaggagagtattttaacttctaaaagaaaatttaattatgtaaggtgattaaagtgattagaaggttatctgatcgaaaatgtagagtgggtagtgtgatgatgaaatgaacacaaaaaaggtttctaaaatgattactatcataataacaatcagcctactacaagcatgtagtttttttgaaaaaaagatagaatatgagccatttgtcaaagatttggatgaaggtgacatgaaaaaggttatgtctgcgagtgatgatggatatgcgtatgtggaacaaagaggtatatatagtacatatgagcaaaaggaagatggagagcatagaaaaacaatctatcaaacttcggaagggatatataatacgaaagataaaagtttatatggaaatacaacacaagaggttacttcagcagtagacagcaaagataataaagaagaagttgtttatcgtaccaatattatgtataaaaatggacaggtacaaagtccggaatcaaatctggatgtttcatatgtgaacttaattgtagatcgtttaaaagggatagggaaactaaagatgaagcccggggatgatataaaaaagtttgatcagcctagtactgttggatacaaactaactgaattagagtttcagagtatcattaatgataagttgaaaatacaatatgatgaatatgatggtggatcaatcgcattgcatattgattctaaaaatggttcaaagcagatattggaagtaagtattgtaataaattataagaaaagaaatgatgaaggcaagttagtaaaatacatatcacaaatacatacatcttttgatagtcaccaaggtaataaccaagatgcgaaacaggaatatattgattttaaagcaaagtataataagacgcagtaatatttagaagggcatttgtacggaaagataatagcgacataagtggaataaatgtttcataaatatagtgggaagaatttgaggataaacgccccaattgttggagtagatgcaacaattggggcgtttatctatctaaatttagcttgaatacataacatgttttagttagagtcattgctccgcaagtagcttctttatcttcataataacagtatgaaattgtgtataatctgcttttattgttaagttataactatttctgcttataaagtaccccttattatcgatacatcgtccacatcccaatgtctttaaatcctagtcgtttataaattcgtccagcagctggattgttataaaataaacaaagtgttcggccttctttcgtaaagtcttgaatcattttttgtaatatgagtgaagcgtagccatttccacgataattcgggtgtgtacatacaccaactaccatagcggataatgaattttcagcggaagtagaggtggatgcgatgatcacgccgtctttttcaatatagtatgtgcgtcctgtattcgtttcgatagcctgccttaatattttctctgattcattagtagtcggaaattcagcaatgtcacttcgtaatttcataattcgttctatatcatcgagtgacgcaagtttaatcgtttcatgaataggcgtgtcaggtaagttgttgtcatttagacattcacaaaaatacatttcatttttgacgcctaattgtagacttggagcagtttcaaacttttctacaatagttgacttaccagagagtttaagtggcttatatgcggaaagaagtgcctcaaaatcagtggtaacaaagtcttctttactatatggtataaatgaatcgtggaatcggagtaaaattgattttaatgttccattctctttaaatactccccatagttcttgaaaatctgtgtcataactgaaagcttcaatatctccaataataaacaagttaagggctgcttcttcttttaggtaagcgaatacttgttcatgatctttctttgttaattttcgcatcataacgaatcgacctcttttttatttttctaaatattacaacttaagttttttgaaatcaatattaaattttatgtttagttcacaaactttcggaaaaactaggaaagatatgacaaaggaggttatgaacggtggatcatccaattcaagggttaatgaaagcagcaatggaaaatttaaaagaaatggttgatgtaaatacgattgttggagagcctgttcaaacggctgacggtggtgtggtgttaacggtttctaaagtagcgttcggttttggagcaggaggttctgatttccaaacgaatgatggacaaagagcaaacggtaacgctgcatttggtggcggtagcgcgggtggtgtttctattacaccagtagcatttcttgtggtgaataaagatggagtaaatattcttcatttacaaaatgcgacacatttagcagaaaaaatgattgaattagctccacaaacaattgataaaattcaatcgatgttccaaaaagaagaaaagaaagagggaaatcatcatcctcaaaaccctgatgaaatcctttaaaaacgcctgcttatgagcaggcgttttttcttgtaatcactatgtaataaaacacatgaaattgtaaatagtttttgaagttttttctatgtttctaaaatttttcatgttaaaatatgctatagaattgaaacatataaaacgaaggtggctaggtgctttgtctggaggatctgaccaagtaaagaatatgatatatattaatggtaatcgtcgaggtcattgttttattacatcaggaattacgtttaaagagtttgcgagtaacatcccttcaccgcttcatcaagtgttgcttttgaagcacaactttgaatggacggattttcattatcatactttatttgaatatgttgaggaagaaaatatacataagttaattcaagcagagattgatgaatttgatgaattttgttgggtagattttgatgatgcaagcgatttagatgaattagagccgaaagaaattgcagaattattatatttggctcacaaaaaagaaccacttgcaagaacattctttccgctgttgaaaaatcgatttgtttatttttcacatgatgacggatggtacaacaaagtgtattatcgtagaattgctgattttgtaggaatgttaagtaaagtcattccgtataaactcggtgctttcggtaagaaacgtttttctttcttccaaaaatcaaaaatttttccagcaatttcaaaagaattgatcatgggactgattccactaatggaagatggtctttacatagatctagcagggaagattgagtcaagaagaggtcttgaaattccggtatatgtagttggttcgtatgaaagtacggatgaggtgttagataatatcgatgaattgaaagaggaagcaacagaaacaggttggctcatttttgataagaaagaacaagagtggcaatgggttgttgactaagaaaacttggcgtatgaagtcaagttttcttgtcatttgaaaggagtacaaatgaagaaatattatacaattgtgggtattataagtattattctcgtggcaatattacttataacttgtccgaaagaatcagattttaaagtgtatgtagaggataagtatgcgttgaattgtaatgagagtagttttgaatgcacgcaaaatgtagatggtaaaaaagaaaaactacaatttgaaagtacagatgcacgaaatggtgtattctttatgactgtaaagcaaacatttaaaacagaagctggtgtttcaaaagaatatagcggagtaggaatgtttggtacatttctttttgtttcagagaagactttctagtaatagaaggtcttttttttatgcttatgttcatatagatgaagtaagacaagcataggagggatagcgatgaagaacacatgtatcgtttgcggtggtgaggagtttttttcctcaacgttatatgcacgtacgaaacaagattgggcatatgcaccaaacatgtatcgatttgaaaaagtatttattgagcatcgagatgaagaaaattatccagtgtttcaagaaattacagcgaaacattgttgtggatgcggtcatattatgttgtatcatgaatgaacacaccaagtataacttggtgtgtttttttaaaacgctgacaaagcaagcggataaagtaaagtaaataaaacagaaaaactaccaaaaccaattgctgtatatccaagtgttcttgctccgaaattgacagctaataggccaactaaaattgctagggagccgagcgtaactggataaaaagcaatggagaataacgaaagaaataaagcgacatagcctaccattgtgccggtatttgtaccttctatctcatttgcaatttctttccgcttatgtctaattggaatgccagctggtgatatttcagcagcatactcttcgtttttttcaccacttttaaaatgatgatttctctttcttcgcatgtacatccctctctttcaattgggtgtatctatagtatctttcaaaatgagaaggagcatgagtatgagttaaacccaagtaaagcaaaaattggagaatacgcattccatcgttaacatatccatctcctattgaagataaagtgtgggattttttccactaggactgattatcagccagcaacaattggatttttatgagcagttctctcccattaactaatccgcatccattgaattttgaggtaggtgtcttactgcaagcgggataaaacaggaattttggaaaatgatgtagaatgaaatgaatgataatacgtgaaggtaggggaatgtatgacgaaatttaattggcacgagtcagcggagaagaaatgggatagtagcgcagagttttggaatcaaaatagtcaagagatgtgggacagtggtagcagaagtacaattattccgttttttgaacaatacgtgaagaaagaagcacaagtgctcgatgttggttgtggtgatggctacggtacatataaattaagtcgcgcaggctataaagcagtgggagtagatttatcggaagtgatgattcaaaaaggtaaggaacgcggagaaggaccgaatttatcttttataaaaggagatctttctgcattaccatttgaaaatgagcaatttgaatcaattatggcaattaattctttagaatggacggaagagccattacgagcgttaaatgaaataaagcgtgtgttaaagaaagatggatatgcatgtattgcaattttaggaccgacagcaaagccacgagagaacagttatcctcgcttgtacggaaaagacgttgtttgtaatacgatgatgccttgggaatttgaacagttagcgaaagaacaaggttttaaagttgtagatggcatcggcgtatataagcgcggagtaaatgagaagatgttaggtcaactacctacagagttacaacaatcgttaacattcttatgggtatttatgttaaaaaacgtataaagaaatgaaagaatttttaggaggtaaataagtgcagaaaatacaaaaaactgatacaatatcatcagaaccaattaaagggggactagggtatatgacaactactacaacagtgaaatccgatattgaaatcgcacaagaagcgagtatgaagaagattcaagaaattgcagctgatttaaatattttagaagatgaattagagccatacgggcattataaaggtaagttatctcttgatatttttaagcgcttacaagatgggaaagacggtaaagttgttttagtaacagcaattaacccaactccagctggagaaggtaaatcaacagtaacagttggtttaggtcaagcttttaacaaaattggtaagaaaacagtaattgcacttcgtgaaccatctcttggaccgacgatgggattaaaaggtggagcagcgggtggcggtttttcacaagtcgtaccaatggaagacattaaccttcactttactggagatatccatgcgatcacaactgccaataacgcattagcagcgtttattgataatcatatccaacaaggaaacacacttggaattgatacgcgtaaaatcgtttggaaacgctgcgttgacttaaatgatcgtgcccttcgtaacgtagtaattggtcttggtggacctgtacaaggtgtaccacgtgaagacggttttgacattacagtagcatctgaaattatggccgtgttctgccttgcaacagatattcaagacttaaaagcacgtttatctcgcatcgtagttgcctataactttgcaaatcaacctgtaacggttaaagatttaggtgtagaaggtgcgttaacactattattaaaagacgcattaaagccgaacttagtacaaacgttagaaaatacaccagctatcattcatggcggaccatttgcgaatatcgctcacggttgtaacagtgttatcgctacaacaatggcagcaaaattaggtgattatgttattacagaagctggattcggtgctgatttaggcgctgagaagtttttagatattaaagctcgtgcagctggcattaaaccagaagcagttgttattgttgcgacgattcgtgcgcttaaaatgcatggtggcgttgcaaaagatcaattaaaagaagaaaatgtagatgcattagcaaaaggtatggaaaacttacagaagcatgttgaaacaattcaaagcttcggtgtgcctttcgtaattgcaattaataaattcattacagatacagatgcagaagttacatacttacaagagtggtgtaatgagcgtggctatgcagtatccttaacagaagtttgggagaagggtggccaaggcggagttgaccttgctgaaaaagtactaaaagaaatcgaaaaaggtgaaaacaactacgcaccactttatgaattagaattacccttagaagaaaaaattcgtacaattgctcaaaaggtatatggcgcaaaagatattgaatttgctccgaaagcacgtaagcaattagctcaatatgaaggagaaggttggagtaacctaccagtttgtatggcgaaaacacaatactctctttctgacgatgcaacaaaattaggtcgtccatctgactttatcgttacaattcgtgagttaaaaccatctatcggcgcaggctttatcgttgcgttaacaggtacaatgttaacaatgccaggtcttccaaaacaaccagcagcacttcaaatggatgtaaatgaagatggaaaagcagtaggtttattctaaaaggttgtaattcatctcgtttatctgtaaactatatatacatcaagtggcgcctttccatcgaaaggcgcctgttttttggaggaaattatgtttgatccaactgcttttgacaatttaaaagtaatcgtagaaggtgctgtgtatgattttgatctacatggagatattcttgtaacagatcgaaaagatatgatggatcttgcttcattaagtcgtatatatcatatctcatttcaattaacagaaccgtttgaaccattagtagaagcaacattttcattatctgtggatgcaaagaacttgtctggtgaaatactagaagtgcctcagtttacaccaggttgtgaaatgaagctagcatttttattcccgttagaacaaccagaagtaaaatgcgaaggaattgaaacattaatgcgttctatatggggaaaagaaagaatgattatgcagaaagtttcatacgaatataataagcaagcgatttcatatcataataaggtagaggttctatttcaaaaagcgattacagaagaccatgttgatgatttaatagctgttatttcacacatgatagaaacggtgcgaacaatacagcattttcttcaaaaatagagataaaggagaaaaacaaatgataaaagatatgcaaccatttttacaacaagcttgggagaaggctggttttaaagagttaactgaaattcaaaaacaagcgattccaactattttagaaggacaagacgttatagctgaatctccaactggaacaggaaaaacattagcgtacttattaccacttttacataaaattaatcctgaagtaaaacagccacaagttgttgttttagcgccaacacgtgaacttgtaatgcaaattcatgaagaggttcaaaagtttacagcaggaactgaaatttcaggtgcatctttaattggtggtgcagatattaagcgccaagttgaaaaattaaagaaacacccaagagtaattgtcggttcaccaggccgtattttagaattaattcgtatgaaaaagctaaaaatgcatgaagtaaaaacaattgtatttgatgagtttgatcaaattgtaaagcaaaaaatgatgggcgcagtgcaagatgtaattaaatcaacgatgcgcgatcgtcaattagtattcttctcggcgacaatgacaaaagcggcagaagatgcggcacgtgatttagcagtggaaccacaattagtacgtgtaacacgtgcagaatcaaaaagcttagttgagcatacgtatatcatttgtgagcgacgcgaaaaaaatgattacgtaagaagaattatgcatatgggcgatgtaaaagcagttgctttcttaaacgatccattccgtttagatgaaattactgagaaattgaaattccgtaaaatgaaagcggcggctcttcatgcagaagcaagtaaacaagagcgtgaagcgacaatgcgtgctttccgcggagggaaattagaaattctacttgctactgatattgcagcgcgcggtatcgacattgacgatttaacacatgtaattcacttagaattaccagacacagtagaccaatacattcaccgctcaggacgtactggacgtatgggtaaagaaggaactgtcgtatctcttgtaactccacaagaagagcgcaaattactgcaatttgcgaaaaaactaggcatcgtatttacgaagcaagaaatgttcaaaggatcattcgtagaaacgaaaccgaaagcaccaaagaaaaagaaaccagcatttactgggaagaaaaagcctagataaatgatggagaaggcgtaactatttgtagttacgtcttttttgtttgtaaacaagtgataatgggaattgtattagtgtttttaatgtgcctatcatatatatgcttctactgggagtatcgaaaaaagggtagtttatttatttggtttatacgaggaaataatataaaaaagtcgaatattaaaatgatgcgaaataataaaaagaaggtacacatatggataggaaattaggaatgtttttgaatacaaaatatattgaagtaaacgaaggaatacaaaaagcaagggaatgggatttagaatatattcaattatatgctatgaatccgactttcaacttagctaacatctcaaagatacaatggaatacattaaaagaaaacttatcttttaatgagattcaagtcccgtcattagcaattagcttcggagaaaatggaataataggaactgaagctgaatgtgtaatagagagttttaaatatattactgataaagggttaaggttaggagctaacatagtaacagcccatattgggaaaatccctgatgatgaaaatagtgagtactatgataaaatgctacgtgtttgtaatgaaataggggacttagcgttcagatttggaggattcttcgccattgagacgggatctgaaaaagcaatagtattaaaacgatttttagaaactgcaaactcgaaaggactagctgttaactttgacccagcaaatttaataagtgatgtaaatgaaaatccgggagaaggtttattactattaaaagattatatagtacaaactcatattaaagattgtaaagaagtgaaaagtgatcgttcaactaagtatatagaagtcgcagcagggaatggtgaagtagatttcgatatattcttcaaagtattagataaaattggattcgacggatataacatgattgaaagaaatgattattttgatgaactggatgggatgagtcagtcgataaattttgcaaagaagtacataccaactcaaaaggaataacgatagtatttgtagaaagctacatagaatataaaaaccattagggggaaatgtaatgatccataaagtaggacaaattatgttatatgtaaataatcaagatgaggcagtaaatttttggacggagaaggtagggtttcatgtagttgcagaggaagataataagcaaggaatgagatggattgaaatcgctccgaaaagcggtgcggaaacgagcattatattacataataaagaagttatttcgaaaatgagcccagaattgaatcttggtacaccgtctttaatgttcttctcagaaaatcttgatcaactatatacagatttaacaaataaaaatgttactgttggagaaatggtaactatgtcttctggtaaagtgtttaactttgctgatagcgaagggaattattttgcggttatggagaagaaccaataataatattgctatgtgaaaatccccctcaaatatatttgagggggattaaatttttgaagtggatttttcattagagagttgtttaataaaaaatactcctttttcaatagctgtctcaatatagccaacgatttggtcaaacgtaaatacttgtaagtcttcatgcaaatgttgctttggatacaacatatcttcaaaaagatactttcgaaaagctaaaacgttttctctagaaacctcttcaatatccacaatgtgagcctcttgattgagaagagagaaaagctgttgttcttgatcgtaatgatgaagcaactttgcatttaacaatttaaaatcgttatagtacaggggtgcgatagtttcgtcattctctattctattttttagccaaggtagaaaaaatccacttagccaattatcatcggcaatgaggtgggtataatagcctaaaataaatggggaatctatatgtgattcatatttatgaaaaaatgaatcataatctattcttctcgtatagttcttcgttgtaccggcataaaaatgtgaggttcctttttctttttttgaatgaacagcatcaggggctacagctccaagtaagaaagaagtcttatcgtgaattgatagtttctcagcaataccactagcgataataacatgcataattcgtgatcccatgaatgccacctctgtttccagtattcatttcaggaagaggactaaacggttagtattactttccctgtactttttctactttcgacccattcatgtgctttccctgcattttgaagtggaaaagatttcgtagccttaatttgtaaacgtccgtcacgcaaataacggaaaacttcatttgcagtttcttggagcagttcaggacgcttttttcgtgtgtttccaaagctaaaaccgagtatagagcggcaacttgcatgtaaatctttcgtttgaaagttaccaatttcaccgctagcattaccgaaatgaacgaggcgaccgtaataagcaaggcagtttaaacttctttcagaaaccgttccagaaatagagtctaaaattacatcaaccccttcaccatttgtcagttcattgactttctctacaaaatcttcatcttgatgacaaataacataatcagctccagcctctaatagtttagcaagttgaatagcagtagtgccaattccgccagcagccgcatgaatgagtacagattcaccttgttgaagccttgcaacatttgcgagtaaattatagcttgtaaaagatacgattggacaagcggctgcagtttgaaagtcaacttcatggggtaatacgaaagtaagattttcatttgcaacaacgtattctgcgtaagatccattttgaggaaaagcaatgacacgttgtccagggtgaatatttttcacatgagaaccgacacgttctacaataccagtggcatctatacctggaataaaaggtagtgctttatttccttttttaccataacgtaatttaatatcagcgaaatttacactagtagcaacaacgcgaattaaaacttgatcttctgaaatagccggtatatccaaatctgtatatttcatcacttcaggaccaccgaacgacgttacaacgatagctttcatcatatatcctcctcgtatattaatatttaagtcctatttcagacttagattttttctttaataagagtcctgtaataaataaattatactgtttaaaagtttgttcatttcaattaatggaaaaccgtagagtttctatccttaagttgatgggcatggggccatcatatcacttgtgaatatgtcgtctcttgttcacattttcctttttatgatgcaaatagctttttctttacgcgaatgtacgcagaacgctcctacgctcttgcaataaaagcaaaaacggattatccaggtggcatgtatttaagtattgatgatccaaagcgctccttacgctatataacaaacaatggagaaaaattaattttgattggcggagagagtcataaaacaggacaaggaataaatacgatgcttcattatgaagcactttattcttttgctgaagcaacttttggaatagacgaagttccttatagatggtcagcacaagatttaatcactctagataagcttccttatatcggacatattaacgaaagaaatccaaatatatttgttgcaactggatatcgcaaatggggcatgacaactggaactgctgccgctcacctactgaaggactccatcctaaaagtccacagtccctataaagaactgtatgcaccatcacgcttccatgcaaatccagatataaaaacgttcctctcccagaacattgatgttgcgaaacatttaattgaaggaaagattgaaaccgcattacgtaagccagaagatctcgaagttggtgaaggatctgtcgtacatgttaacggtaaacgagcaggtgcttataaggacaaagaaggaaaattacatatcgtcgatacaacttgtacacatctcggctgtgaagttgaatggaataatggtgattgtacttgggattgtccttgccatggttctcgtttttcaattgagggagacgttcttgaaggcccagcagatcaaccgttaaaacgcgttgataatgagtaaacaaataaagaagttcaacagaattacggttgaacttctttatttgttataaaacctgttcagataaatttcgacacaggaaggaaaatattaacattaaataaaataatatattcatctacaaattaaaaggggtgaatattatgcaacctttagctccacctcatctagaatctacagaaactatcttttcaagctctattacaaaacttgttgtttttatttgttggctagccattttagctgatggatatgatttaggtatttacggtgccgttctaccaaagctcctagaagacaaaagctgggcgctatcaccagcgcacgctggtacaattgcaagctatgctttatttgggatgtttattggggctattctagttggaacgattacagatctaattgggcgtaaatggacgcttatatgctgtttagcacttttttctatcacaatgggtttagcggctatcgcttcttctcctgagttatttggattatctcgatttataggaggaatcggattaggcggtgttatcccaacggcttcagcacttactgttgaatattcaccaaaaaaaaggcaatcttttatttatgctcttatgtttactggctatcctttaggtatcgtattaggtgctattttgtctatgtttatgttagaagatttcggatggagaattatgtttggtatcggaatgattccactactcctcattcctttcattattcgctatttacctgagtccattcaatttttattatcacgtaatcgccaagaagaagtgaaccaaattcttaatcgttttcaaattgaatttcatgtaaaaaataaaactcatcaagctccatctactatacgaaagaaaaatggattttttactttattctcaaaagaatacataaaagcaacactacttttttggatcacttatataatgggaatgtttttaatatacggtttaaatacttggttaccacagatgatgcgccaggcgggatatcctcttggatctagtctgtcttttctacttatgctaaatattaccgcagctgttggtgcgttattcgctggagcaattgctgatcgtataggcgcaaaaattgttattagcatctcttatcttatggcagccatatgtatcggactattaacaatcaagccatctgttacaatcatttatcttttaattggccttgctggtattggatcggtcggtattactcaaatattaaatgcatatgtaacacaatacttcccatcacatatccgagctacctccttaggctggggactgggacttggccgagttggtgcaattgctggccctattctcgtcggtattattatgacaatacaatatgacttagcatggaatttttacttattctcctttgcaggtcttatcgcagctatatctgttttcttcattcctacaaaataaaaagagcacaaacttacttgtgctctttttcatatgcttcaaacagcatgtctcgaaatagtgtatttaaaatttcaatatcgatccctgatcccttttcaattccttttacatattgcccatagtaatgaatttgttcttctaaaaattgatttagcaccttaattttcaatccaacatctaattcagtacctgcttttttctttattaacaacttttcaatctcatctaatacactacgttctaatggtaattctgtaatcaatcgatcaaattctacaggtggtaaagttgctttctcttctagccacttacaagctaaaataggacgtaatacataaaagtactttttcagctttacattctcaccttgcaaaaattcacgataatttttcgacgccatatgtaaataatgatatatcgttgcttttggatcaaaattcttctcactcatctgttgaagtagttctggaaaattagagtttttcgaataaaaaattggtgatcgaatccactcaagtaaagctgggttcgacttcgcgaatagttgcaacgcctttttaatatcccaaccacttatatctaaatcatcactaattggatattcaattacatctcgtttgtcatgaattgataaataccattctaccggatgtatataaacaaacctaacatcataatcgctatctttcgatggaaacccccaagcacgactccctgattccaccgcaaacaaaattttcacatcattctctttttcaattctttctaactccaactcgattttctctctcatttcataacatctccattttttgattatttccttggaaattcgacaatacactattaattttactacatactaaaaaaactgtcagaaattactgacagcctaataaaacttctattgttgcttttcaattacagtagcagcaattcgttcaaactctttttgaatctcctctttatatgcatctactattgaaaaatccatagcagcaatataaattcgttctaatttatcacgaaccgattttgctttcgctaagaaagacattgcctcattcatttttgctttatactgaatggaaacatcacgaatttccttcgcatatttctcatcagtccctggcgtaacaataagggcatacatatcaataatttcatcaccctcacgacttggaaaatattcatgcggtgcggtgctatcaaaaattgcaaagcctaattctcttacgataaccatatcaagactattcgggtcaaatccgcaatgatatacttcaacttcaaaccctttttcttcagctgccttagctaactttttaagcatcgttgattttccagaacctgggcgcccttttataaaataacgatgtggtaacccttctgttaaattaggaacaaaatcaactgctcctttcggtgtagcagctcctaaaaaacgatgttttacaagcgattttctcccgcttttatctgcaaataatttctggattagctgatcggttagttcatttgctttattaaaatctatattatcaatatatatcttctcccactcatcatgtataagcaatgcctctttaaaacgtgcgtaagcagactgaaaagctttacttgcttctgaaacaaatctttcaatttctaacttctgcttccttaatttatctgagtcccaagcaattcctaaatttatatactcttcaacaactcctggcattttgggctcaattacatgtggtgatgtcccatcaacaattcctacttttaattttgggataattacaccatcaaccgatttattgtcagaagaacaatgtaaaaattcaatatcatatcctttttcaacccattcacgaccgatggcctttattaaagaagatttccccgttcctggaccaccctttaagataaataatctgtctaacccttttaaattctcttcatataaattatgaaatcccctagctgtattaccaccagcataataattcaatacatttcctgtcactgcactcactccttcgcagcattgtatttacataagctacaatatgcgcgtagctttatttgggtgaatacctattttgtattgcacgcaaaaaggaaatgaattacaatttaactatcggaaaattccgatttcaaaattaaatacttctttatcaagagaggcagagggaccggccctttgaagcccagcaacctcagtttatacgaactgaataggtgctaattcctgcaaaatgcattgcattttggaagataaaactcaactagcatgtaaagctcacctttcttgatattgaagggtgagctttttattatttgaaaaacatatattggaggtatgtaaaatgaaagtaattgatttatcgcaaacatttgaaaataatatgtctcaatttcctggaacacctaaaatacaactagaagctgttacaagtgttgaagaatcaggctatcaagttacagattttcattctgtcgttcatgttggcacgcattgtgatgctcctgcgcattttatttcaggcgcaacgaccatcgatcaattacccctaaatcaatttgtaggcgaagcggttcttattgatgtaactcatgtacaagaacgaaaactacctaaagaagtactggacgatgccgatataaaagaaggagatattgttattttccattccaatctatctactaaatggaatacagaggcgtatgagaaagaagctttttatctttctgaagaattagccgaggaactagtacaattaaaagtaaaatctgtcggtttagattttatttctcctgatgaggtaacgacagaaacatcaccaattcatcacatactacttgggaataatatttatttaatcgaaaacttaacaaacttagatgccattcacacgaaacgtttcttcttctcagcagcacctttaaaaattaaagatagcgacggtgcttttgcaagagcatttgctgtaattttttaaacaaactatacaaaaaagcaaagatcatcattgacctttgcttctattttttttatttaaattaagaaagaattgctcaacatgaggacgtaaccaagctaaataatccttctctttcttctttgtacaagctatttcttccccatctaccatttcaacaagttctagttctaacagttgcttcgtgaatgctaacatattcacttcttcggatggatactcttcttttaatttctcctcaatttcccccaataaaaaaccgtcacgcatcattgccaatgcatcaatccaaagtggcggcatttcatatttttctcctgtaattgtgtcttttacagtataattcttttgctcttttcgaaattgaatcgtgtgtaaacatacagtcgaatttaatgttaattccatcataccacctctttcataatatctgcatagaaaaaaggatgcgcgtgcaccccttcttatcttttcataacactactgaaccgttacatgagcaatcaatctcatgtcgatattttccttcattataaacgaagtattttataaaaaaaacccttcttgaaacattttataaaatgtttatatttacacaacaagaacacttttctgaaaaatcttttctcaaatacattaaacggtcggcagaaaaatttctactttcgttcctactcctacactactttggatcgtgatactcccttgatgttccttaataattttatatgtaatcattaatccaagtcctgtaccattctcctttgttgtgtaaaaagccttgccgattttttctaacttctcattctctataccaaatccttggtcttcaacagaaatacacaaatatccttgcgttttttgatatgcacggatatgaatttctccaccctctggcattgattctattccatttttaatgatatttaataacacttgttttaattgcttatcatcaccgtttatagccggtaaattcccatctacttgtaaatgacatttaactctatattgcgttgcataactttccattagatgcacaacatatagaagggtgtctcgtatattacacctttcataatttgttggctttggtttccctaacaacatcaattcactaacaaatccattaaccctttcaatttcttgtagcataatgtcgtagctcatcgtatcagttggatttctttctttttgcatttgcgtaaacccttttaacgctgttaatggatttcgaatttcatgggcaattgttgtagacatagtcccaatcacagctaaattttccgtctctttcatattgttcatcatttcaaccactgttcttacataagattgaaatcgttttaataaagaatgtgaaataatgaaataaaatacacataaaacaagtggaattatcacttttaaatcttgtaatagcaatgtgaaaaatacgtactttccaattacactaaaggaaactaaataaaagtattttctattcacgaaaactggggcaaataaaattaacaacatttctaccatactaccatgttcaaaaggtctatccgttcgcaaataaatcattaaattattaacaagattgataaacatgtatccaaataaaaataaatattttacagaatatacataccctcttttttgaagatatatagaaataggaaataatgctattacaaatataggcacacctatcccaagactaccttctggccaccctaccgctgttccactaatattcatagcaggatatacaaaataatatatagcgtcatataaaaagaatataatataaaataataatataaatacctttaaggctcttctttcttcataaatcaagctcttgtatttgttcatataaaaactccccttgatcgatacaaaaaactttcattgttatctccttaaagtataagtatgaaattgctttcagggcaatatttaaacttataatactaaaaggaaggagatctctccttccttttagtaacaacttatatccaccttaccctatcatgtaacaatccatcagtaaaattattatgccctattacaaaatccttcatatataaatttaaatactcaccgtacttactttctgtatttaataacaactcctcgacgtaataagcaccttgttcaaattgatctaaaagtaaactagacaagcccgcataaattccgcaccctacctgaaaatacgttgcattcgttttatatttacgaaaaacttggctactattcattacattatacatatatgtctcactattttcataaacgagtaacacaccgaccaagtcctctccagcaacctcttcttccgctggattaaacactttacgattccagttccataaatcttctacttgatctaagttctgtctaattatatttgttgtatactcattaattcggtaaagaaaaccaacttccatattgaagtttttccctaaaattaatacttcctcatgtagcattaagcaaccatataattctttttctcctaacttcactttatactctgaagcatatacatcttcataaaagtaaagaggacgatgataactcatatacatcggataactccagatcgcttcatctaaaaatcgctctactgcccatgaagcataaagtgtatgtggctttataagtgccgtatcattcaaaaatgatgtgtcatgttctacaatataacatgctcttggcctttcatttggtcgttccttcataagctcaacaaccatccattgaacaacacctggattcatacctgaacctataatcgcttttgtatttgtaaatttctctttctccttctcaaaccttgtatatctttccgtaagctgaaagccgattaagctgtcgtcctgatctactgcttcattttccaaggctgaattaatataacaaattcctagttcattacaacagcttaatactctaattgtatctgcccctgaaacatcaatcacaacactcgttcttttttcttttaaatgttttttaaattccactacattttgaaggtttatttcatataaatataattgatctttcaaattcgaaaacagctcatcataataagtcctatctttttgttttatatccaccaaatgaaatttggcattctttaatactttataaattggatctttttcatttactatcgcttgatttaaaattgctaaaactgcttttgctgctccaccagcactaccaagcaatgtaattgataacgaattcggaaactgctccacaaacaaaacccctttaataaattagttgagcagctcctcctcaaaaaataaattgaatacataataagatagctcgtacacaatttttataagttagtgcacagttaccttttaaaaaatcacactataatatgtttatattcaattcattttcccctcatatccaaattagactaaaacaaataggctcgaccttttcttctccggataaaagaaaaagccagccctttcaactaatctacggacaatggacggattttacatgttgaatattcacatacatttttgcatcacgtgcttttgatatttcaatatgaccttcatcaattttcgccatttttccaattttattggactcctcacctaaatcgaacaccataattttcccagccattttaataagctgttcttcaaacgttctagctaacgtaatatttaacggatttacggggagttcatttttattgagggcatacggtacttggttttctttatacggaattaaccattttaaatgctttaaagatatatataccgttttataaaccggactataaaaaacaatatagtcgttcatcacacttgtaacataaccatgtattggagcatttcctgctacataaacttctgtaaaaatccctttagaagtacttaatacttttctcaaagaaattgaaggggattccctcttaattacagaatcaacatctggttttagtatgtcttcgtcatgtgctcttaaaaatttatagtattgtacatgatataaagatatatatacatagtcttgtccattgtaaagaacaataatgtcatttcctacgtctattaatatacctttaaaccttttttcaccgattaatttaacatatatattttccccaatacttttgtttaactcattcatctatatcctccttcctatgaatttcagctttactatcttccatttcaaaaaaataatcagggcaatgttctgtcttaatagtaagtaattccttttcatactatcgaaataagaaattgttcttctctttccctcataatgcccctcttatttattaaacattattcatcttcattctttttacatttcactacttgactcacactcttaatatgataattaatgatataaataacttcatcaccgtttactagcgtaatacattcttcatgcacttcacttaataggccttctacacactctgggccgccacgattaatctttacccacttatacttcaagtcacgtaatacatcgacgaaagtatcatcatcagagcagaaacatgaaacatagccatcgccacatttactttctttcactttcttaactagactcttcacatgtttcaattggtaatatactaattcaccaagaggaagttgtaatgtaaggtaatctcttcctaacgatacaagtacccccactcgactctctggtccacgaagatttacttttacagtctcaccgactaagcctttaatttgttcacagcataatatactttccaaatttgtatcctcctttcttattatcttcctcttcttgactgtctttgtgcgcgagctcgacccgaatcatcactttcactattgctttcactgtcgctttcttcgctttctctacaagctactgcgacactcttaatatgagatactgcaactaatataacttcttcttttacaattagtgtcacaaattcacaagaaacatcttgtaaaataccttcaactttctctgggccaccacgattaattttcacccagcaatatttgaagctttgaagtaacttttcaaagtcatcttcacattcacattccaaccatctgcaatcatctgctttacaatctttcgcattttttgtaatacttttcagatgacgaatctgatagtaatagagctctcctttttcattctttaatacaaagtaatccgaacatacagcgactattgttcctttttgagattctggaccacccctgtttactctcacaaaagatccaattaagtctttcagaaaatcacaatgaaataaactcacgagaaaaccccttccattaatttataagcttttgcactgatagtatatgtatctgtacaggttacgttctctatgtttgtcctagctagaaaaaaatatgcttttaacatggtagactactacctatcaaaatttgaagaaaggctaagaactccttatgtttttgatatcttcaaacaaaaaatcccttatgaatatacatttctgcatatcttcataagggattttccatagtttaatcttcgtctttaacatccatatcttctggaattggttcgttcaatatttcttccactaattgcttatatttctccatttgttctaaatgtgtattaaattgttctttatttactaaatattgctctccatcgaatagcgcacgaattttcttttgctgaattaactcttcaatatacgattttggtaaattcaaatactccgcagtctcttctactgttatatacaatgcgttcattcctttattattttttcatctatactgtatcttactttactttatttttgtaaacaaataaaaaagattttgtaaatgcagttcaaaaagcaggtagatgcattccatatattgtatagtattatatagtaagaattttttaaatatagaatggtattacccatttacacaaaggagagttaacatatggctactcgtcacatcattacaatgttagaaaaaacactacaagttgaaacagaaaacacaatttctcatttaaatgtatctttatctgatcgttttctttctcaaagcacagcaatacatgaaaacaattgttatcatacaattggtgaatggtacaaaaatcatttcttattccaacaagatgatttcctttgggctaaatatgccttctatgacgcatattgtgaagccatcaaaaaacaaggtcatcttacaaaacgtgttcgccaaatattagaatcattagctcgaatgcatggaaaacaatatattgcttccatactaaatatgccatttcctaatgaacgcgctaaagggacagcgtaatttagccatgttctgcgtaagcaaaacatagctaaattgttttctaggatgctttaccaataaaaagttcatatcatacgaactgatgaaaccggtgtcattataatgatagaaaatatagtaaacaggaaaacccccacgtacatctctcatccatttgaatagagaaatacgtgggggtatacttgttccttattatttcattatctgcttaatcagttcgcgatttctcttcttaaatacttcattatgagaagaaaccattccgtactcacttgcatctggttggataaattgtttggctttattcacagcatttccagcatcttggaatgcacctgcaattaaatgtagtttcccttcgtgctttaaaatatctccagcagcatataatccatctactgaagactcactatttgcattacctgcaatataataattatctataattgcaacgtctaactcactattttctaataatgtaatgtcgcgttcatatccatgattaataataacttcatcaataggtaaatgagaaacctcacctgtttcatgatttgttaattctacatattcgattgcttcatgattatcaccagcaattaattttgtaatcgatgtattaaagaaacactccgctgagctgttcataagttgttttacttgtgcttcatgaccagataattcttcttttctataggttaaatacactttttccgcaattggttctaattcatttgcccaatcaacagcagaattgcctccaccggaaataataactgttttacctttgaaacgctttaaagatttaactgtataatttaaattcgatacttcaaatcgctcagcaccctcaatagataacttttgcggtttcaatataccacttcctgttgcgacgataactgtttttgaaaagtgttcttccccagtacttgtttttaatgtaaaagtaccatcttgattacgaataattgattccacttttgtatctaatacaacttctggcttaaatgttaacccttgctgtacaagttgttcaattaacttatcacctgtaactggtaatagtcctcctacatcccaaatcattttttccggatacacatgtatttttccacctaaatgtggttgaaattctattattttcgttttcatttctctgagtccactataaaaagctgaataaagccctgcaggtcctccgcctatcacggttacatcaaacaattcttctcgattcattcgtgctcactcctcagctactaatcattgattatcattctcaataaaatataacctgtttccgcaaaatttacaatcaaaattactattgacaatacacctatataaaattatattatttaaagaatcaatagtgataatcattatcattttgttaataattagcaaatttgagattacatcttctttcattactatggttattactatattataaaatctcatattcaagatttttaataaattattttgcattaccactactatttcaaaaagattacagttaaacaaattattgtatacacatatcatctatgttaaaggagaaagacgatgaaaaagttatttatttcactaacagtccttttcgttcttgttatgagcgcttgtagcaatagctctacagacaaaaaggacgatgcaaaaggtagcaaatcagaaacaattacataccaatctgaaaatggtaaagtagaagttcctgcaaatccaaaacgcgttgttgtattatcatcattcgctggtaacgtaatgtcattaggtgtaaatcttgttggggtagattcatggtctaaacaaaacccacgttttgatagcaaacttaaagatgttgctgaagtatcagatgaaaatgttgaaaaaatcgctgaactaaatccagatttaatcattggtttatcaaatattaaaaatgctgataagttaaagaaaatcgctcctactgtaacatacacttacggaaaagttgattacttaacacagcatttagaaatcggtaagttattaaacaaagaaaaagaagcaaaaacttgggttgatgacttcaaaaaacgtgcacaagacgctggtaaagaaattaaagcaaaaatcggtgaagatgcaacagtttctgttgtagaaaacttcaacaaacagctttatgtatacggcgaaaactggggccgtggaacagaaattctgtaccaagaaatgaaattaaaaatgcctgaaaaagtaaaagaaaaagcattaaaagaaggttactacgcattatctactgaggtattacctgagtttgctggtgattacttaatcgtaagtaaaaacaaagatactgataactcattccaggagacagaatcatataaaaacatcccagcagtaaaaaataatcgcgtatacgaagcaaacatgatggaattctatttcaacgatccacttacactagatttccaactagacttcttcaagaagagctttcttggtaaataatacaaacatgaggaattcttaaattaagaattcctcttcctttattctatgaacagaaaagatgtgaaacgaatgacaaaagatcacgacaatccacgttctatagcttttacatacaaactaattttgagcataattgcattctttcttatttttatggtggcaatggtattaggggctgccgatacttcaataaaagatgtatggttagcgctcacttcctctgctaaaggggacaaaatatctattattcgagaaattcgtttaccacgtgaagtagctgcaatttttgtaggagctggacttgctgtttctggagcaattatgcaaggattaacacgaaatccgcttgcagatcctggattactagggctatctggtggagcaaatgctgcacttgcactgacacttgctttcaacccttccatcagctatctttacttaacattagcttgctttatcggtgctgcaatcggtgcgattatggtatttggaattggtatggtgaaaaaaggcgggctgtcccctcttcgaattgtattagccggtgctgccgtttcagcatttctactcgcaatttcagaaggagtcggcatttacttcaaaatttcacaagaggtatcactttggactgctgggggcgtaattggaacaacttggggccaattaaaaattattattccagtcatttcaattagtatctttatcgctatcttactagcaaaaaaattgacagttcttagtttcagtgaagaagttgctattggactaggtcaaaaaattattgttattaaaaccattctatttatcattattatattacttgctggtgcgtctgtagctcttgtcggaaatatggcatttatcggcttaatggtacctcatatggtacgtccaattgtcgggccagactaccgatttgttataccaatgtcagcaattactggagcttcctttatgctacttgcagatacagtcggacgtactattaacgctccgtacgaaacaccagttgccgctattgtcgcaattgtagggctgccattcttcctattcgttgtacgtaaaggaggaaaaacattctcatgatgcaatctattctaagaaaacaacgtcttattatactcgctttactaatactaaccatcacaaccattgtagttggaatgggacttggttcagcatctttatcttatgatcggctactcccaacattaatgggacaagggacttttaaagaggagtttgttttatactctttacgactacctagaattgttattacattattagctggtatggctctcgctttatcaggtgctatcctacaaggaattacccgaaatgatttagcggaacctggtattctcggtatcaactctggagccggtgttgctgttgctattttctttttatactttccaatagatgtaggttcatttctttacttactacctgttgttggatttatcggcgcatttctgacagctgttctaatttatgtattttcttatagtaaatcaactggacttcagccaatccgactaacattaactggtattggtttttcatttgcactatctggaatgatgattgtccttatttcatccgctgatcgtatgaaagtggactttatcgccaaatggattgcaggaaatatttggggagatgactgggtcttcgttttagcaatgctcccatggttaatcgtattaattccgttcgttttctataaagcaaatcgattaaacattctagcattaaacgagccagtcgcaatcggcgttgggattgaaattgaaaaagaacgcagatacttattagtcgcagccgttgcgcttgcagctgcagctgtttccgtaacaggaggaattagttttgtcggactaatggctcctcatattgcaaaatctttagtaggtccaagacatcaaattttcatgcctatcgcccttttaatcggcggatggctattgttattagcagacacaatcggacgtaatatcgtcgatcctaacggtattccagctggtattgtcgttgctttaattggtgctccttactttatgtatttattgcttaaaaaggcgtaagaaacaccctcaagattttttcttgagggtgttttttatttcattctactgttgcccatacccttcaaacttcttcgccaaattctccatctcatcttctggcaatagctttggttccccaatgcttttcgtttgataataaatttgagcacaaaactcaatctcttctgcaacagtaaatgccatttttatattatttgcaccagcaattaaaccgtgatttgcaagtagcacagcacgacgatcaatcatgccttcaaaagcagcatccgctaattgcttcgtaccaaatgtttcatacggcgcacagcggacattcggacctgcaaaagcaattaaatatgacacagccggaagctcccatcctaatgacgcaatcgtcttcgcgtaaggagaatgtgtatgcacaagcgcatttatatcttcacgcttcctatagtaaataaggtgcatatctaattcacttgatggttttctctctccttctattacttcaccatctaggtttaatataactacatcttcaggctttgtttcatagtactctaaaccacttgggctaatcgcaacaagaccttgttcacgattaaagatactaatattaccacccgtcccctttgttaaaccactagaaatcattttctttccatacgctacaatttcttctctttctttttgtaataacatatacatccccctaagtatgaagcttatgatgactgacttttatatttatctacttattgaaatatcttttttaaattctccgtaaacggtgcccttacaatccctttttctgtaataatcgctgttacattttcatgtggagtaacatcaaatgctggattatatactttactttctttcggagcagaatattgtccgaagcgattaatcacttcagaagcatctctttcctcgatgggaatttcttttcctgtcggtgtttttaagtcgattgtcggcgttggcgctgctacataaaacggaatgttgtagtatttcgctaaaatagatacgcctaatgttccaattttatttgctatatcaccgttcgctgccacacggtcgcatccaacaattacagcgtcaatcttcccttgtgacatgaccatagccgccatattatccgtaatgacagtaacatcaattcccgctcgctgtagttctaatgccgttaacgttgacccttgtaatcttggacgtgtttcatccgaaaagatttttaagtcccatcctttttctttcgctaagtacattggagccgtcgcagtaccatacttagtcgtcgctaacgcaccagcattacaatgtgttaatactcccattccatcatggaataatgttaatgcatgttctccaatttgacggtttatttcttcatcttctctatgaatttcttttgcctcttctagtaatctatctttcaactgtgagattgataaatgaatattatctgccgctacactttccattctttcaagtgcccaaaataaatttactgcagtcggtcttgatgtcgccaagtatgtacatacctttcttacttcatccataaatccttcttccgtactttcagcaaattcctttacccctaaatacactccataagctgctgaaacaccaatcactggtgcacctcgtactttcattacttgaatggcatcccacacactttcagctgttttaaatgattcatagacaatttcattcggtaataacgtttgatctaacaaaactaaagcatcatctttccactgaattggtattaattgctcttccatcatattctccccttactccgcgtagtgcattgactgttcttttaacgtttctacaaaacttctacctgttctatattgattcgctcgtaaaataaaactcttcgctactttaagacaaatttgctccgctctagcacgtgcttcctcattctcaatacaagtaatatcttttactttcgctaatccaacaatacggcggattaattcaagacctgtcactgcagctgtatcctctaatacagattgtaaatatacttcgttaaagccttcttccttcgccataatctcggtcacatgaatatcccaagcatctaaaaacttcttcttaaataaatcaattacctctaccatcgtagtttgtaaccaatccatatacgtatctttctcagctccaggtggcatcgttgcatctgcattcacccaagcaaacattaaattcgccattacattcccaacgtcatatcccataggtccataaaaagcaaactcaggatcaataacctttgtagaatcatctcttacaaaaacagaaccagtatgtaaatcaccatgaagcaatgcctgtgcattcgtcataaaagaaaatttacgtttcgctacttccatacgaagctctttatcactataaatatgctccctaatccatccctcatttaaaggaaataactcattacgcttattatgatttgtaaatggttctgaatatacgaggtcctctgtaatctcacataattcaggatttatataattcttcacaagttccttcttctctttatgattcattacaacatcagatgttaataaaagtgtatttaccataaaagtagttaagtcgtcagcaagctgcggaaatatttgatgatttataagtgctgtacgtaatattgtgtgattcgataaatcttccattacgcaacagttcatcacactatcaaataaatacaccttaggaacaagtccaggtgctaactcattctctaactgcaaaacatctgattctatacgaatacgattcgtcgataacttaaactcatctgaaatgcgagctgtatccccagcttgctttacgatgacagacatgttctcttttttatcccaaacgcggaacacataatttaaattgccatcacctatttctttacactttagcccctttgcatgttcaaacttagataatttctctttcacatatgcaatcacatcgctagcttccattaaaaaatactttgtgaacttagacatggtttcccctccacaccaattgtaagcgttttctaaaagctataaaaaataataggttgaattttttcatcctataaatatgtattcttctttttgaaaggtatatctaggttttattatatcttgttagcactttgagtcaatgtttctaactatcagcgtaatatacttcctaattatatatttgagatgacaaaaattgttcaaaaagatttcgattcattttattttatttatcgcacaattctttgtaaaatagaaataagcagttccttttcaaatacataacttctaagaaatatttccttcctaagaatttacacttacaccatatttctaacatacacactactctttcaaacaatcattgaaaatttataaacttaaagttacctttccattccctgttagccttaattgagaataaatattaattaaattggtataaagttggtttattctcttgacaaaataaccacttctatatgataattaatatcgaattagaattattatagttaattaaaaaatatattttatgagcacactattttttgatgctcaaaaccaacatttaggaggaattttaatatgttattaatcggcacagaagtaaaaccgtttaaagctaatgcttaccataatggagaatttatccaagttactgacgaaagtttaaaaggaaaatggagtgtagtttgtttctacccagctgacttcacattcgtttgcccaactgaacttgaagacttacaaaaccaatacgcaactctaaaagacttaggcgttgaagtatactctgtatctacagacactcacttcactcacaaagcatggcatgatagctcagaaactatcggcaaaatcgagtacatcatgattggtgacccaactcgcacaatcactacaaacttcaacgttttaatggaagaagaaggtcttgctgctcgtggtacattcatcatcgatccagacggcgttatccaatctatggaaatcaatgctgatggtatcggccgtgacgcaagcattcttgttaacaaaattaaagctgctcaatacgtacgtaacaacccaggtgaagtttgcccagctaaatggcaagagggttctgcaacacttaaaccaagccttgaccttgtaggcaaaatctaaggagttcgatcaaaatgatactagatgcagatataaaaacacaactatcccaataccttcaattaatggagaacgatattttacttaaggtaagcgcaggagacgataacgtatctaaagatatgttagctctagtagacgaattagctactatgtcatctaagattacagtagaaaaagttgaattagagagaacaccaagctttagcgtaaaccgccctggtgaagacactggtgtcgtattcgctggtattccattaggacacgaatttacatcattagtgttagctttactacaagtaagtggacgcgctccaaaagttgaacaaaaattaatcgatcaaattaaaaacattcaaggcgaatatcattttgaatcttatatcagcctaagttgtcataactgtcctgatgttgtacaagctcttaacgtaatgagcgttcttaaccctggtattacacatactatgattgatggcgctgcattcaaagaggaagtagaaagcaaagacatcatggcagtaccaactgtttacctaaacggcgaatctttcggaagcggtcgtatgacacttgaagaaattttagctaaaatgggtaacggtccagatgcatcagagctttctgataaagatccatacgatgttcttgttgttggtgggggccctgctggtgcaagtgcagcaatttacgcagcacgtaaaggcatccgcactggtatcgttgctgagcgcttcggtggtcaagtaatggatactatgggcattgagaacttcatcagcgtaaaaaagactgaaggtcctaagctagtagcaagccttgaagaacacgtaaaagaatacgacatcgatgtaatgaatctacaacgtgcgaaacgtttagagaaaaaagaacttattgaagtggaacttgaaaacggcgctattctgaaaagtaagagcgtaatcgtttctacaggtgctcgctggcgtaatgttggcgtaccaggtgaagctgagttcaaaaataaaggtgtagcatattgcccacactgtgacggtccattattcactggaaaagacgtagcagttatcggcggaggtaactctggtattgaagcagctatcgacttagcaggtatcgttaagcacgtaactgttcttgaattcatgccagaattaaaagctgatgctgtattacaagagcgtcttaacagcttaccaaacgtaactgttctgaaaaacgttcaaacgaaagaaatcactggtactgataaagtaaacggtatttcttacatcgatcgtgaaactgaagaagttcatcacgttgaattacaaggtgtattcgtacaaatcggtcttgtgccaaacacagactggttaggcgaaacagttgaacgcgttcgcggtgaaatcgtaacagacaagcacggcgctacaaacgtaccaggagtgtttgctgcaggtgactgtacaaataatccgtacaaacaaatcatcatctctatgggttcaggtgcaaacgcagctttaggtgcatttgattacttaatccgtaactaataaaaaacaggtgccttggcacctgtttttttattaccctaatgtataaactaaaaacctctcattcccattcttctcataagcacctggcaatctaacttctttcttcagctcaaacgcagtctgattttctaagaagaaaatatagtcctcagaaggataatataaaataatatccacttctctccccgtattttctactgaaagcaaaatgttatttactacattcataaacacttgcacagaaaacggattaaagaaataaaacctattatcatgtggatcaatcttatattcctgcgctaaacaacattggaattgaattttccccttactgtttcgtgcctttcgggcataacgatctcgattatccatcgcttctttataaaattcttcattcatttcaattccaactgctgaagccccacatttatgatgcatataaaagtttaatcgcccttttccgcacccaaagtctacaattcggtcgctacttcgtatttcatattgattcaataactcatctaacccgctatacggcgtcggttcgtagcggtgataatgcatagacttgttaaaccctttttgctcaccgactgtttttatatgtaaaactgcatcgtaatattgttcgttcattcgttttctcctattaaaaaatggtacttattattatacaccatgtactggaggctcatttttcatcaaattaataggtacgtgaaattatattaacgattttcttaatatatctatcgtaacttcaaatatatcaacgattttctcaatatatctatcataacttcaaatatatcaacgattttctcaatatatcgatttaccgacaattcacgacaaaaaaacaggagctctttagcccctgtcttctaacactttcaatacagtttgtttcaatatttctaccccatccataatacaactatgatcaaacctcatatacggatggtgtaatccaggttgtaggtctgctcctagtccaagcatgacagcttttaaatgtggtcttttcactgtatagtaatggaaatcatcgcttcctgtcgtatagagaggccctgtgcatctctcttccccatacacttcgagaatacctttacgcataaagcgctctgcttcttcggaaacctctgctcctggtgcaagatccatccattcgtatgaagttttcgaccccatcgatgcagctgattctattacatgctcaatctttttctttaattcttctaatagtatattactctcagctcttacatctaaactgaaatgaccatttcctggaatgatatttaaattatcaccacctgcttggcatctcgtcatttttactgaataggaactttgcggtggcagccaaatatttttcaaaccgatattaatcatggaaatgacatcaattgcattcacaccttggtgtggtcttgccccgtgtgcatcctccccatgaatcataccctctaaaaatcctgctgctccatggcgaatagatggggctgcttgtttcaaagatagttcttcaattggtcttagatggatgccaaataagaaatcagcatcatctacagcacctttctccaccatcttcaaagcaccattccccttctcttctgccggctgaaaaataaatctaaccataccacttttccatctcatatttttcaattgtaaaataagtcccattacaatggtcatatgagcatcatggccacatgaatggttcgctttaaattctccatttacttcttgccaaagtgcatccatatcagcacgaatcgcaataactggattcccgcctccaatctcagcaattacacctggacaatcatcaaatgttctatatgaaattccttcttcttttaaaaagtcagtaatatacgctgtcgtttcatattctttccaacttacttcagggttttcgtgtaaatgctgaaaaatctccgttaagcgctcttgtagttctaatgttttcaacgttccagtctccttcccacattacaaacgattcgggttaattatacttatgaaaaacagatgtttttatgaacatattgaattttaagaaaaaagtcaattgtttatttttaaatacttaaaaaccttactctgcacttatattacaaactaaacaaacaactagaacattccttattttctgttttttatgttgacgcttacataaacttttagttatcataacctaataaacgtctattttacgacaattctaaaaatacaaacaaacatacgtaacaaggaggaactttatgaaaaaagaaataccttttggaatagcgattatccctattatcattaccgttgcagttatgatggttacaattgttgtattaaaacaaacccctcacgttccacttattatcggtacaaccgttgcttctattgtcgcttggcgttatggttacaaatggaatgatcttgaagaagcaatgtataaagggattcgtcttgcattacctgctatcgtcattattattcttgttggcttaacaattggtgcttggattggcggtggaatcgtcgcaacgatgatttattacggtttaaaacttttaactccatcactatttttagtttccattaccgtcatttgttctatcgttgcattagcaattggtagctcttggtctacaatggggacaattggtgttgctggaatgggaattggcctaagtatgggaatcccagctccaatggttgctggtgccattatttcaggctcttattttggcgataaaatgtcaccgctttcagatacaactaacctagccgcaggattaacaaatacagatttattcgcacacattcgtcatatgttatttactacagttccaggtttaattattactcttatcgtctacgcggtcttaggaagaagcttcggcgctaacaatattgatgcgaagagcatcgatcaaacgttacaagtattgcaacaaaactttgttatctcacctttcctactcattatacccgtagtcgttatggtattggtcgctaaaaggtccctgctataccagcgattctcgtcggtattattttaggatttttatcacaagtctttattcaaggtggttctgtctcagcatctgtcggtgcactccaagctggatttgttatagacactggaaacaagctagtagacgaactatttaaccgcggtggcttagattcgatgatgaatacagtctcgatgacaattgtcgctatgactttcggaggagtattagaacatacaggtattcttcgctcaattgtaaatcagattttaaagttagcgaaatcagcaaaagggcttatcgcttctactatcgcatcttgttttgcaacaaaccttacttgctctgaacaatatatttcaattgttgtcccttcaagaatgtacgcaaatgcatacacagaaaaaggactacattcaaaaaacttatccagagcattagaagatggcggaacattaacttctgtcttcgttccttggaatacgtgcggtgtatttattctcgctacacttggcgtaggtgcatttgaatatgccccttatgctattttgaatttcatcgtacctattatctcaatcatttatggtataacaggcttcacaattgtaaaactatcagacattgaaaaagcagaactgctaaagaaacaaaaagctcaactagaagcttaaaaatagcggtaaattcagttcatatagtgcgcgaggtcgcccttgttgatagggcatttcctcgccgcaaatatgagcatacccgtaatcaactaatttctttaacaacctttctgtcgatcttcgagtcacttgtaagtactcagaaaggtcagctgctgtaaacttcaatgacggatgcgattgactaaattgaatgatttttgacaagttggccggactaagcttcgtttccttcgctattttcattagttccggattatcatttttcaaactttgtactctctgttctttcgggaacggaccaaacaaatctttatcacttgttagtatataaaaacaacgatctattggattattctttgcaaaactttgagcaatttttgcattttgctccgcctctttcacggtttttccataaccaaatccaatagctatcgttccttctacgctcgcaaacaagttatttatcgcatttgttttaataatcgattcgatatcaccacgagttgtatacaaaatacatgtcatttcatccacttgtttaaatgaaccacgtagttcttttgaaatgacatctagtttttcaagcaaactcgttcgtaattctagggaagaaataatacaagcaccaacagtagctgaatagctttttgctaactcagcttttatttttgcatcttttagaccatgtataatggattgtgttggatcaatcatgcgctctgaaggaacacctattttttgaagctcgtcgtaaacagcgtgaatactagttaaagctaaatgagcttctccagattgatatttagctacatgaaaatcgataactctatttatttcatctttactccacagcatattttcataatccaacacttgcgggctttcttttataccaatatcatggaacacatttgtaataaacgagcggtctactaaatcgatggaaatgttatgtggttgaatactttgatgatacatgatagaaagaattgaagatgcgacagttgtctcgtcttgctgtaagtatgtacttggaattcgtaattgttctcttatttcttttgccatataataaggtaaagcacctgagaaaaagatgacatcacaaggctttagacactttaataattcagaagattccgccggatgaaggtaaatatatggatcaatttctattccttctaatttttgagcaataggaaaaaggttctccataaactcctttgaaccgacaactgcaatttttatcatcattttctctaactccttatcattaattaacgactatttaacgtcaactatatcaaatgtacaaaactattgtaaacaggaaggggtttctattcaatgaaaattacagctattcatctttacgcaattcgtttaccgcttcgcaatccgtttgttattagttatggctcttattctgatatgccctctattatcgtcaaaatggaaacagatgaaggtattatcggttacggtgaaggcgttgctgatgatcacgtcacaggtgaatcatgggaaagtactttccatactttaaaacatacgctaacccctgctctaatcgggaaaaatccaatgaatatcgaaaaaatacacgacatgatggacaatacaatttacggtgttccaacagcgaaagctgcaattgatattgcttgttttgatataatgggcaaaaaactaaatcaacctgtatatcaattaattggcgggcgctatcatgaagaattccctgtcactcacgttttaagtattgccgatcctgaagatatggctgaagaagctgcttctatgattcaaaaaggttaccaatctttcaaaatgaaagttggtacgaatgtaaaagaagatgtgaaacgtattgaagctgtacgagaacgtgtaggaaatgacatcgctattcgcgttgatgtaaaccaaggctggaaaaatagcgcaaacacattaacagcactgcggtcattaggacatttaaacattgactggattgaacaacctgttatcgcggacgatattgatgccatggctcatattcgttctaagacagacctcccgcttatgattgatgaaggactaaaaagttctcgtgaaatgcgccaaattattaaattagaagctgctgataaagtgaatataaaactaatgaaatgcggtggcatacatccagctgtaaagctcgctcatcaagctgaaatggccggcattgaatgccaagtgggatcaatggtcgaatcatctgttgcctcttccgcaggattccatgtcgctttctcaaagaaaatcattacgagcgtagagctaacaggaccattaaaattcacgaaagacattggaaacttacattacgatgtaccattcattcgcttaaacgaaaagcccggactcggcattgaaataaacgaagatacactacaagaactaaccgtctttcaagacgttgtacgctaaaggaggactatcatatgacggttctatacgaaggaacattaaaacaaaataacgaatcatttcacgttacattactatcactagagcacatcgaacaaattttatcactacaaaacatcgtagttgaagcactagaagataaaagtcgtttacaaccactctcactagaagaatttcaatacattctagaaggaaacggcatgatgatcggtgcttttatcgaaaacaaactcatcgcatttcgcgctctactcgtccctcctatcgacgatgaacatttagggcttgatattggtctatcagaaagtgaactgcaccgcgtcatctatcaagaaatctcaaacgttcatccgaactgtcgaggaaatgggatgcaaaaaatattagcaaacgtcatcatggacgaattacaaaaagaagatagcaaatatgattatgtatgctgcaccgttgctccttttaacatcccgagtttgaaggataaatttgcgcaagggatggagattgctgcgctgaaggagaagtatggtggtagtctgcgatatgtttttgtgaagaaattgcgcggagataaagaaagcgattggacggatgttcaaagtattctaatgagtgatgctagtggacagcaggctttgctttcggaggggtatcgtgggtatgagatggcgaaagtggatggggattttgttgtgatgtttggacgctaacctatatactcgaaaagaggagatgtctgctgtgacctctccttttactttctcttcattgaacatatcgattgcaactccgaatatatcagcgattttcaaaatatatcggcgcaacttcaaatatatcagcgattttcgaaatatatcgacttaccgacaaagattgacaataattgcaacctatacaaagcgcaacattaaaccgtcatcttccaactagataaagctaaccagttctccatttccttataatcgggcatgattttcccgacaagacgccaaaacgatcgatcatgatttaaatgaaccatatgacacatttcatgaacaactacatagtcaattactcgctgtggtgccattgctagcttccaattgaatgttagttgtaaattcgaatcgcaagtaccccaagtacgactactatctgtaatacgaatagaacgtggttttgttttgaaattactttgatgcgctttaatactcttctctactaaagatttacactgcttatagtaaaatcgttttaaagcttgttgtattttctcatccttaagctctttcacataaatatgtaacttatcccctttaaatactgcgttgtcttgctcaatgcttgcatcttgggaaatctgtatcggatacgtattccctaaatacaaaaagccttctccttgatcataatccttttcctgtggtccatgcgctcgctcctgcatttctttacgtgttgtctgaatccacccccacttctcttctagcaactggactaagtattcaacaggtgtccctttcggagcctgtatttctacatttccatacgaatctacaaaaagacgcacggactttttcttcttataagttatatgaaaattaattgtctcacctaaatatgtatgtaccatttcatcacctagcatagtatttttacaaataaaaaagagtaggatacgaacgtcctactctacctattatatcatttactgctttaacgaactcattatcctctatactttacacctaatcccttaatgaaattccttgcgtatctatcgccgcactctttgtaatttttatgacctttttttcttaatagagcgcctaactctccttttgttaccgtaacgcctacgctatctaatatatcaagtacatcctcactcgttaaagatagtgcgattttcattttctttagaagaaggttattggcactctccttgctctgtacaggtgcaggctgccctggtttcggatcttgctttcctctttttaaagtaataaatccatttaaaaatgcctctaacatcatcatatcgcatgtttttacgtactcatcttcagctacctcatcattttcagcttcatgctgaggagctctctttatttttgtaagcatatcaactacgtcttctttcgttacttccatcccgccaagtttaaagatttctaccatatctatatcttttatatctaaagcgtatcgtactctttttaatatatcgttgttgctcattgccattgggtttcctcctgaaatgttgattatttattcagcggttaaagtttatgctataacctgctttaaattatcatgtttaatctaaccttttagttattgtccgctaaattaatactttaacattttaaagatatgttttatagtcttacccgaacttttctctatcattgtatctacagagctcttacatgttttttatatgcctataaaaagatttctctcttaacattaactaaaagaaaaaaacagtgctttgatttctcaaatacactgttcttttccagctctgcacttattttcaactcactcatgtcatgcactacatatgaaatgatttaactgcttaaaagttaaaccatctcactatcctgagccacaccaacactatcctcaaacttatccaacaaagcacgcacctcatcggtcgatttcgtactcatcaattgatttctcaattccgcagctcctgggaagcccttcacataaattttgaagaagcggtgaagtcctgtgattgagcgtggcagtacttctgcatattgatcttgaagatcaagttgtagtcttaaaagatctagatgttctttactgctatgttctcttggctctttttcaaacgcaaatggatttttgaagatgcctcgtccgatcattacgccatcaatgccgtatttttcagcaagttccagtcccattttacgatcaaggatgtctccattgattgttattaacgtattgggtgcaatgcggtcacgtaattttttgatttccggaattagttcccagtgcgcatctacttggctcatttcttctcttgtgcgtaaatgaatagaaaggtttgcaatatcttgtttgaaaatgtgcgttaaccaatcttcccactcgcttaactctttaaagccaagtcgtgtttttacgctgacaggcagtccacccgcttttgctgcttggataagttctgctgcaacgtctggacgtagaataaggccactcccttttcctcttgatgcaacgttcggtactgggcaacccatgttaatatcgatacctttaaaccctagttctgccataccgatactcatttgacggaagtattcaggattgtctccccaaatatgtgctaccatcggttgttcgtcttctgtaaaaattaaacggccacgtacacttttcataccttctggatggcaataactatccgagtttgtaaactctgtgaagaatacgtccggacgacctgcttcacttactacgtgacggaaaacaacgtctgtcacatcttccattggtgcaagtacgaaaaatggtcgtggtaattcacgccaaaaattatctatcatttcaaattcaaatcctctcactatgaatacaatttcaaaatctaaatttataatttgtgaaaatcagcaatatttattttaactaaaatcgcttatgaatggtatttttgtaaaccaaaaagcaggtggtatagattttttctatatcaactgctttcctattatactaacttaagccaagccacacactccacatgagtcgtataaagtatatcatatcttttggtatatcctatattactgtagtgcattcttttgcaaaaaaataaattaaaatgtcctcttgttatttcaaatgaatttaatttattttaagtgtgtggtcatctttgtggtcagtggtcaaaaaagagccgagttttatactttgctcttttttttaaaattttatctctcaccctctttaaaaagaacgtttgttcgtgtaaaataatgacatatcatacgaaattgagggatcatcatggaaaatcaaagttggggtacaccgaagattaaaggaagagggatggttttaacaatagtataatatatgagtagagataacgtatacaacgataggtagttctctttttttgtctctttgtagaaaagaaatatatgacgtattataatcattatagatatcaatggaatttaaaaaagatgactcctgttggatacagaaaccatcttcttgatgttgcctaacttttttcaaaatgtcctttacaaagggtacagattaatgtgatgcatctctttttcttactacttattgttttcatttcctatatattcaatagtttcttttaatagctcttcaaagttaataggataatcatgatctaagtcaggcacaactttatacttatgttctatatttttctctcttaatagttgtacaaattgctgcgtggattcgaaacaatcttcatcttgattcccgcatactatatatccttttatatgtttatccttcagcactcttagcaactcatcccattcttcaatctcgggaagccatggtgccataaaaacaaaaccatctacatttatatcttgttgtaaaatcgtatataaagctactctcgcccctgcagaaaaaccaccaatgattacactttctactgtatgattttctataaacttattgtaatgctcttttaattcctctttccctctctctatgtcctcccaaacaaatccatctgaaaactcaatttgtgaagactgtggtaaagctaacatataatcttgtatcaaaacagatttccaatatggttctactatttgtatattttcttggttaccatgcaatgtaagtagtagatttccctctttcttactgtatatatatttcacatctggtctttcctttttatgtgctaattcttctctttctttacataattgcaccattgtatgaaattcttcaaatttatgtagtgattttaaatcttcatcggaaattaaatactcatttccataccagaatcccttttctataatggcctctctcattaaatgtaatgcttctttttcaagtcccgatgcacttgcgagtgcatacttaaaattatatatttgcgcctcattccctattacacctgtagcgttttccattatataattgtacgcttcaaaacttcctttatttgcataacaacgtaacgtttcatttaataattgaatgtaagtcatactatttttcatgtaccaattcccccgcaactttttataatatttattttgcgaatctttataccactttgtataacccacgctaacaataccttattctcaaaatgatgcttaatagttgctcttccctgtccaatacatttagtataaataagaatagactgaaaaatcaatattttaacaaacaaaaaaagacaacaatatatgtattgttgttttcattacgtctacccactcttttgtttttttctatctggtttacttgaaactaaataatgtttttctgaaatatataagtctctttttaagctacgatttaagtaaggtcctaatttcattccacatatgaggcgatcttcgctaccttcaacaattgggaacatttctttttctgttacgtattgatctactgctttttgtacgacatcaatttctttcactaggtttaaattttctgctgtatgttcaaatacctcaagcgtttccttcgttatgagaaaaacatttgttggaaatgcaggtaaatatggttttaacaaatcataatttactgtataatcatcatttactaatactgtataaacgatattagcattcgtttctaaaaactgagccatcgcttgttctaattcatctttcgtaatttcccgctcttcttttccagttctgaaaaagcgaaacatcgcatcgcctcctttttactatattatagcataaaagaaaactgaaaaatcataaaaaaacccattgaaataatttttcaatgggtttctatatatttatcgttattttaagaatgcacttagcatccatacatgctgttctaatgttgtatgaattgctaacagcatgtcagctgatgtttcatcgccagcttcacccgcaacttccataccttcttttaattcttgaataagtgcagaataatcattcactaatgtttgcaccatttcttctgcagattctttgcttgtcccttcactgacactagatgttgcgagatattctttcattgtcgctaatggtttaccttctaaagctaaaatacgttctgctaactcatcaatatacgttccagcctcattataaaactcttcaaatttctcatgtaatgtaaagaagtgtggccctgtcacataccagtgataattatgtaatttaacatataacacattccagtttgctacctgcttgtttaatacttcaacaacatttgttttcgtactcatacaatcactcctcttatcattttgtaatgtttatcttttaataacttaattacattttaccatacattccctttcctttcgaacaattggcttatatgtaacaaagttttaacacctttaatgcttccctaatatcatttaattcatgtattttttcaaccacttcatacgtctaattgtccaagctcatacatatgcataatagtacatcaagctcatcatagtagaaagagggataacatggacaatcaacaatggcaagtagcaaagaaagtagctgctacttatatcggaactgtcgttggagctggatttgctactggacgagaaattgttgaatttttcacagtgaatggattatacgggacaattggcatatgtgtaagtggatttttttttatttggcttggcacaaagatgatgttactttcatcacaaatcggggcattttcagcgcaagaatttaacaaatatttatttggggatgtatttgggaatgttgtaaacacattattattactcgttttattcggcgtaacgagcgttatgttatcaggggctggtgcagtatttgaagagcaacttcgcttaccaagacaactcggtattctcattacagttatcgcttgtctcattataagtagccgcgggttacaaggtgtttttgaagtaaatacacttgtcgtacctattatgatgatttttattatcggacttgctattacaaccttttttcacggtacacctcctattaataacactattcctgcagagagctggaatatgaaatggattactagccctattacatatgtcgccttaaacctttctctcgcccaaagtgttctcgtcccattagccagtgaagtaaaggatcgaaaagccattttttggggtgggattttaggtggtgctggactttctttaattttattatgcagccatttagcaatcttatcagtcgatcaattttatcaatataacatcccaatggctgaagtcataagaagatttaatgcaacttttcacttcttcttcgttctcattattttcggtgaagttttcacaactttagttggtaatgtgttcggaatgacaaaacagatgcaatctattactgggtggaaaaatcacaatattattttcttcattttactaattagttattgctttagttacatcggttacagtgacttacttcacattctatatcctatcatcggatgggtaagtattgttatacttccaatcattgcgtttaaacaacttcaaaaaacataaaaaagcatccatgttattggatgcttttttatgttcattcacaatcatcacatacttcccagtacggtcccatttctaatgctaaatacggctttaactgcaaccgaatcattcgactaggcatgcgttctaaaacaaattgaataccttcttcatcttcgtctaattcaacttttgaaatcgtaattttttgcatagtcgtaatgggaattccatctttatataaagtgattttcacctcatcgtattcattaaaatacaattcgacactcatttgatttttcagtatttcatcaccaattttaaatgtatcattttgttcttggattatatatttccatccgcctctatcttctttcggagctgtttgaaataatgtctccaaatcctcgtatagcataagataacccctctcttactaaaaaacgatgagtattttatataccctttatctctatcactatccatagctattgtaccatatatcaccgttcttaccgtattcatttgcttcatacacacttataaaataactaattctatctccattattatgtatattacctcattactccatacactcttacaagttcaaataacgacagactttaatccatgcaaatattgtctactctccgcttttattagctcacagcattcacacttttacatatagtaagactaccacaaataaaaaaggagagtgacttataccactccccttaaaagaacttccctatagctgctaaaactaatacgattattaaaattgcaaataataatgagacaatgaaactaaaaataggtaacgctttcttttcattcttcttaaatagtaactttaaactaagaaaaatatttactggtacaagtataaaataaaaatatttaacaatttgcaccgagctattcgaaagtgtttttaatataaacacttcaattagaaaaacaataaaaaatgaaatacttagccaaaatgagacgtaactaagccaagaatgtctttttgtcccccaatacactcccataatactctccttttatttgtattctataggttaataattatacacaaagctaacaaacacctctatttttcgacaaatattatgcaaaataccattttaaacgtcataaaggaagtttacatctccatttgattttacataataaaacagactaccctctagtgtcataatgctactagggggagtctgttctctattaaactttaaatctctcaattaatacttgcaattcttcagccatttgagatagcgtacccgccgctgatccaatttcctccatcgaagctagctgttcttcagctgaagccgcaacattttgtgtgcttgtcgcattattttgtgctgtcattgcaatttgtcctactgaaatagatacttcatttgccccttttgacattccattagccgtttcaaccatcgtcttaatttgattagctatttcatttgtagattgtaaaatttcagcaaaattttgcttcgtttcatttgcaataacaagtccagattgaacttcttcatttacatgattcattgatttgactgtcttacccatatcgtcttgtatttcgcctattaatttactaatttcactggaagatatgctagactgctctgccaatttacgtacttcatctgcaacaattgcaaaacctcttccatgttcaccagctcttgccgcttcaattgccgcatttaaagctagaagatttgtttgatctgcaatgttttgaattacttccaatatatcaccaatttgttttgatttattatttaataactgtataacagcatctgattgtgaaaccgattctgcaatagactgcatctggtttactgttcttcctactagtttcccaccatcttctgctttttcacgagtatgagcagaagcgatattaatagatgatgaactatttgctacatgctgaattccttccgttacatcaaacagtaacatagcaccattttctacacttgttgtttgcgtcgttgccccacttgatatttcatccattgctgttgtaatttgctcagttgcttcactcgcttgtcttacacttgcagttagttcttctgatgctgctgcaacatgtcctgccgaagtgttaatccttccaattaacgtccgtaatgaatttgtcatctcgttaaaacctttcgcaagttgaccaatttcatcattagaatgaatttcaattgtttgcgttaaatccccttcacttatttctttagaagtgataactagtctctttaaaggcttcgtaattgaaagtgtcacaaaataaataagtactccacctactactaacgaaataagcataacaattaacatattataaaatacaggttgagcagcttcaattacttcagttgcgtacatcgtcccaccaattttccaacctgtttttacgtttgtagcaaataccatattcttttcactaccaccataagaatatgtaaaagcaccatgattatcttcataaattttctttgcccaagaatcagctgctttatcccctgatttttcttgtggatgagcaatgattttttgctttccatctaaaatgaaggcatatccttttttaccaatattgattaactttgttgtttttaataaattgtctaaacttaaatctagcgcaacaaccccatttttatcttctgtttgttttgcaatcgttacgacaatatgtccatttccttttgccttatatggctcgctaacaacaataccaccttgttttgccactgcatctttataccaaggtcgtgttgttggatcataatctgctgccatttgtatatttggttcctgtacaaatttcttatcattaccggcaacatacacttgttcaacatctatatttaaattgatatactgagataatgtctttcttagctcatcctgattatccccttgatacatattcccttgaattactcgtgcaaagttattcacatcgttaaattttgcttcaatcatttgattgattaaattatctaatatttttatattatcgttagcactactcgtaatttgtgattcaaaattctttttagcagtttgataagacatgcccccgattatagaaacggctgcaattaaaattacaaagaatgaaattaatagcttttttgctactttcatatcacgaaacaaatttaatagtttacccattatgaacctcctaattttcaaatttaaaagttaaattgagttaattataaatatttcccattccttaattattattttcataacctattatggtgaatactttgtaaagtttaaacaattaatttccctttgtctatatatatgaataatattattataaaatttacaaatagaaaaaaccaaaggggcccctttggtttttacatttttttatgttgtttagaaattttcttccatttatcacgctctgctctggcaaggattgcatcttgtttcctcataaaatacgccagttctctttgtaattttttatagcttttcaaacgatctatcgtaataagtccgttttcaattgcactatacaccgcgcatcctggttcattctcatgcttacaatcacggaaacgacatgttgtcgcaagttcttcaatatcagagaatgctgtttgaatcgcttcgctgccttcccaaagttgcaattccctcatgccaggcgtatcaatcacgagagcgccactaggcaattggaataattctcgatgcgttgtcgtatgcctccccctactatcctcttcacgtatatctcccgtttttgctacatcaattcctattagagcatttaacaaagttgactttcctacccctgatgatccaactaaagcaattgttttccctgaagaaacgaattgtttcaacgaatctatacctgtatgctctaaactatcaacaacgaaaataggaacaccaattgctatagcttccgtttctacaattttctcttccacatcattacatatactactctttgttaaaacaataactggcatagcgccgctttcatacgctaataataaataacgttccatccttctaacattaaaatcatgattaagtgcattcactaaaaataaataatctacatttgctgctataatctgttcttctgttcttgttccagcctcttgtcttgagaaagagcttcttcgctggaaaatacgatgaataatcgctttcttttcatcttctattttctttatatacacccaatcaccaactgctggataatcgcctttcgtaatcgcttcatgccgaaacttcccagacagttctgccatatattcaccatcattacaaataatgcgatatatatgcttatgctcaagtaaaatacgacctacttcataatttttctctgtaacttgttcttcaaaaaatgaatcccagccgaaagattctaaaatattttgattcaaataaatatcctccctagtttgtactaagtggaaggattgcgaattaccttatataatatcgccctttccatccacctttgtatttggttgattattcatataagttattttcgccataatacatcaccccgttcttattttaattattctcattatatggaattctcctataaaaagctacattattttacgtaattttcaaataacttgtttttgagcattctaatttgtcctcgatgactaatttcatcttctagcacatgaaaccatagatagtgctggttatatgctacaccgttaggccactttctttctgacatgagccactcatcaccttgttcacttaaatacttcagagattcttctcgaacactttgtagaagttgtacataatactttatttcatgaccacggattgctctacccgcttcccctaaatacagtgcatcttcccatatttctaattcttcttttgtaaagtcacgatcttgaaatgaaataagctgatgaactttttcaatagctgctatatgctttaataaggcgccaattgaatttccgctgctttgcataattaaatctaattgctcaactgataaattttttacttcgcctaatgttacagctctcgtatgctcaagcaggcttactaattcccctatttttttgtataaccatctacacttcttattcgataatctatattcatatcacgcacccctttctgcattcatattattgtaaaaatgattcatataatagactgaaatctatctaaattttctgttataattaatttgaatacaaaatatacccaaacaaactttctcaatatgcttatatgaaatattaaaaggaatcaatatgaaataatcgaatcttattcactaaaaggagtggattcgatggaaatgtatcaatggctaaccgctgttctcgttggtggcattaccggcttcgtttcccatctaatcaataaccaaggtaagttattgcttccacgccgtttgaaaacattttttcattttggatttttaactgatatttttactggtagcctagccgcacttcttgggctcgttttattcgatgtcaccgcaataaaagaaattataaaagtatccattgtaactgctatttccggtcaaacttttttactacatcaagctcttggtggcgaacaggctaaaaatacgcaaattgggaaagctgatgagaagattcaagaaattgacaaattattgcgacgttagtgtatactttcttttaaaattattgttataatgagaaataaatattttctattgcgtcgtttgtcaggagaaagggtgtttcgtatgacaaaaaagaaaatagaagatttcttaacaaactccgaaaaagaggaactgctagaaaactataaatgtttacgagaagcccgcacaaaaagcgaagctaactattttggcgaagcagtaaaccatctattaaataaagcaaaacaacgaattattaaagatgcaggtatacatgatgaaaatgctgcaactgttcaatcaaagagaaaagcactgttttagctacattagctaaaacagtgctttttatttagaatttttttctttccatgctatattctctctgcctttatctttccatttttacagtttcaaaagtcatctagacctaaagatcaacctaataatattagcccacgcaaaccattttaataatagataaaataattgaactagtaatgctacaaactaaataagtttattaaatcgcttcttttaaatctgaatgcggatttggtccgtattgattgtcattttcttcactttcaatgataaaaaatacaagtaaaacaatgctaccaaacggtacaaaatttaatagttgccaccatcccgttttcccaatatcatgtaatcgtcgtgcaccaaccgaaaaacttggtataatcattactaacataaatagcaacgcaataatagcaactaacacctctgaaaatgatgataaaaataacagtagccaaaaaattacgatattggataaactaaaaatccagtactcttttcgcgtagctctaccactaaaattcccataattctttagagctttcaaataccattgcatttaaacctctcccttttatccccaataaaattaaaatatgtaattattaacagataagtagaaatataacacaacatttatgtaaaatccatatccccatctaaattgccctctatttaaatagttttttccttcggcatttttcacattactttcacatctatttcacaaatataagtagtccgatatgctaaactaagtatatccttttccaaggaactatatgccgatatataaatccctatctttatagggatttttattttttgattcctcataactttgttacaatacatttcttctactatctctatacttttagtaaccactttaattaaaagcacattcatgtattcacactcttattaattctgatttgcgaaatatttatacaagctttatgatgcaattcctgtttcactattttcagtaattttttcactttttctaaacaaaaataaagctcctatatatagtaacgcagtaaaactacctataagtataaaattgtgagatattgcaaataacattccagctattgccgcaccaatcatttgaccaatgtacatagaagcatttgcaagcgccgctcctgttcctcttgctacactagacatgttttgtaagtgcctcatcattaatacaaacaaaattcctgtcacaaaaaataaagcaaagaacaataactccaccaatacaatgttctttacatgaggaagtaatacatatagcactgctgtaaatataattccaccatagaaagaaaggttataaccaattttatttacgattctaggaccaaaaatattaccaattaaatttcctaatcctaatacgagcatagctgtacctacttcatgaacttgtaagccaaattgaatggaaagccatacaccaaaaaatgaaaatgcagcaaaatttccggtttgaaaaacaaagtatgcaaaataagaaagtgaaacctttgaatctgtaagtaattgtttataacgctgtaaaatcgcttttttatttccacctatatgaaccgactgtatttctggtaatacaacataaataagaatgacaagtagtgctgataatataccaatgaaatagaatggaattgtataatgtatcgttgctaaataagctcccagtggcagccctaaaatttgagagattgataaccctgctgttgcaacaccaattgctttcacaatttgcttcttctctataagaagcggaatagatgcccacacttgtggagatacaaaagctgcacttacacctgctaaaaatctaaatgttagcatccataaaaaactcggtgcaattccacaaaaaaacgtacttattgcaaaaaaactcatacctagtaccattactttttttctgtttaatccatctgatataggaccagccacaagcgcaaatccagcataccctaaagcatacgaactcaccatccatcctgacaactcagttgaaacatgatacacctgttgcaatgtcggcaacagtggtgaaattaagaaagtatctgtaccgatcataaacattatcataaaaaatacagctagtactctgttcatttagaccttctccttatataaacagagggtactctccctctgtttaactaatcttctaaaatagattggatttctttcatgactctttcattcaatgcaacatctaccgctttcacactttctcttacctgctctgcccgctttccaccaggtataacagtatcaatcccttctttatttaataaccatgctaacgctaaatgagacacttcaatatcattttctttagctagcccttttaacttattcactttcttaaaattactcttatatgtattttcttcaaatagatttacattttgacgccaatcgacttcatttaatttaaaatcttctgtatattttccgcctaatattccaaaagcaagaggcccatatggaataaatgaaatacccgcttctatacaatacggcaacagttcttcctcagctgtacgttctaacatattgtatggagattgtacaacatctatatgaccatgttgattcgcctcttttaattgttctatgtttacgttcgatattccaattgaacgaattttcccttcttcttttaaatgagtaagctctccgattgaatctatgtaacttgtttcaggatttgtaaagtgtaaataatataaatcaatatattcagtctgtaatcttcttaagctattttccacagcattccttaaataacttggttcattgttaatataagtttctccatttaacaacggttgaattccaccttttgtagcaagtataaactcatgacgttttccctttaatacttctcctactaattcctccgatctaccgaaaccatatgaatctgctgtatcaaaaaatgtaatcccttgctgaatagcttcttctactaatcgctttccttcttcttcattcacatcagcatataaattatgtccccctactgcatttgtacctaaacccaactttgaaatatttaatcctgccttttgcaattttatatacttcattttttctccccctatatttctattgttcgaatatattcgaacaatagaaatataccactttatatgttatagtgcaaatatcttaacttatacaagtaggtgaaatatgcgtacactctatcatccaaatcgagaagaaattcaattttcttctgtcttatatgcacttagcgatcaaattcgtttacaaattgtaaatatgttactagagaaaaatgaacaatcttgtggtgctttaaacatccctgttgcaaaatcaactttatctcaccatttcaaagttttacgtgagtcaggtgttatgtacacgcgccttgaaggaacacaacgtttcatttcaattcgtgaagaagatttaaatgctagattcccaggtttattacaagttgtattacatgcgacagagccatattaaaaaaacatctcatattcatatgagatgtttttttaatatggctattcttttaataaatctattaatccattcccttcagatgtacgttcgtaccctaaaggtacagttcttttaatgagttgtgcatatatttccggctccgataactttcgaccgtattctttctcacactgtttaatgagcaaggcgagcgctccagcaacatgcggcgtcgccatggaagttccacttagcacagcatattttccttctggatacgtagataatatttcatcacctggcgctactagatcaatttcttgatttgaattactaaaacatgcaatcttccgctctaaattaacggcaccaacttcaattacctcggagtacgcacccggaaagtctagttcctctgtttcatcatcgcaatctccattatttccagcagcacatacaacgagaacatcctgctttaccgcattttgaattgcttcatgtaattctggaacatcttgcggaccaccaagtgacattgaaataattctcactttctcttgattcggccctctccaatttacagcataatgaattgcctcaataatttgctcataacttccagaaccatctcccgctaaaacttttaatactaacattttagcaagtggtgcaactcctaatacaccgacaccattttcagtcgcggcaatcgttcccgcaacatgagtaccatgtccgttattatcaagatacacatttggatcagcttcataatcttttgtgaaatttcttccgccgataatacgatcttttaaatctatatgattagtatcacaccctgtatctaatacggcaacgactacatcttgccccttcacactcttttcccatacttgcggagcgtgaatcagttgtacacctggtggaatttcatttacttgttctaccaccttatttacggtaaacggaatcaattgtatacctttttgtttattcactgtactactcatcgtaatccctcctgaaaatgtattattttcatttcagaccacttttgaatacgtgtaaatgtaacattcgttttattctttttgttttccttcttttcaaatatttctcaacatcatttactacctctataatacttctttattttccctatgatttgtaggaagtaacaacccgagtcgttcaactaataaccaaaataagaggaccaattaatggtcctcttacagtcttttaaaagaatgatatgtatttgaaaaataatataaattaagactaaacctcactcttgtttaaaaacttttctatttcttttactaaatattccgctccctctatgccaactgtaatatttccatttgctaatgtaatattctgccctgaaacatcacctgtgatttggcaagcattgtaaggttgatatttttgtaaaatgattttatctgcttctacaaaaatttcaagcggtgatttgatttgtattcccaatacatcgcgtaattctttagggataacaattcgtcctaattcgtctacttttcgaataactcctgttgctttcatatttctccccccttactctctattaattttttcacctcgctttttccattttatcactttttgacaatacttgcctctttttagaaaattttgtactcgagttaaaaaaacacatttaatgcatacgtaatctctctttcaattgttttacataacgggatcttataagtaagaagtatacaacttgaataactatgaaaatacttaatacaactgtattttctttaaacaatgagtactcaaacatttgccctaacgccgttaaggctactgctccatgtaatgttgcaacaccaattggaacgaagaataaaagcgccaatcgaattgtaactaccttcgataattccctacttgtcaatccaactttacgaatcatttcgaacaaacgaacatcatcctccaaatcggagaataaacggaagtaaaggaaacttcctgcgcaaacgaaaaatactataccaataaagaaacctacaaataaaatcggtcctgcaatttgtaaactttggttttgctcgtactcttccgcactaaacgttgaatattcttgatacggtttaatttgatgcgtaagctctttaccaatttcaatctcatctttcgttctttcagttttatacatataatcttttgtctctataaacccatcttgtaatgaatcatattgattattagagattacataaacatttcctcttaatattttccccaatgaagatgaagtaacttttttcacttttaaattttcattcatattaggtaaagtaatttcttttctttctttcatcgttggccctggtatattagctgacaaaaatacaacttctttatttgctacagtattaaatggttctcctgttaactttgcatatttcttatagtctgattcttttataaaaatggcgcttcttaacgactgttcctccgttttctttgtcgaaatattagtttttgaagctgctatactatgtttctttaatcctttgtcaatcatttgtatatgctgtgattcgttactattcccttgcttagaatggtaatgaaacgaaatcggtctctccattatccctttcgtcatggatgcgaagccaactaatgtccctattgcggaaaatgctacagtagaaataatggttacaataaagaacattcttgcgttatctctcatgcgatacgctaaatctgataacgtaataatattagtctgtgtccaataaaaacgtttactttttttacataatcgaataataaagacactcagctgcttgtacaacaaatacgtcccaataataactaccgttgtaacaggaatcatcataataaataccattgctccatgtgatagaagagctcctacatagccagcactaagcaatactactgctaatatggaagaaatgattgatgctttcggttcaggtttcgcctctgccgatcctctaaacaacttcataatcttatttttacgaatcattcctgcactaaacaatgatatgatcataaataaaataaaaaacataatactcgttacaacaattgctttcatcggtatgtaataggataaggagatatctagtttcaatatcatcggagcgacaaatagtaatacccctgaaaataacatacctgaaagaataccaaaaataattgcccctattccaatcataatattttcaaaaaagattagacgctttaattgatatttcgtcatacctaacatcattaaaatccctagttcacgctttctcgtttttaaaaacattcccatcgaatataaaataaagaagaatgtaaataagtaaataatagactgtgcaaaagacatacttacgaatacgtactgacctaattctcctgcacttaatgccggatgaaacgcaaaaaatgaatacacaaaaaaggccataattgcaaatgcactactcaaaaaataggctgagtatgtccgtctatttcgggttacattccgatatgctagttctctaatgttcatattacttctccgcccttctactatctatgtttttatattagtaaagtgcggaaataccttccatcgattcaaatgacaaaaaccttacatttttgaaaggtttaaaaaaattgcttatacgtagtactttatttataatgactacattcatattcatattcatacacacatcctattgtatattcgttaattttgcgaaataataaaggatagaagtatgtaccattatacatataaacttaattaccgctttaatatgaataggaggaaacataatgacattacaagaacagattatgaaagcattacatgttcagcctgtaattgatccaaaagttgaaattcgtaaacgagttgatttcttaaaggattatgtaaaaaaaacaggtgcaaaaggatttgtacttggtattagcggcggacaagactctacattagcaggacgcttagcacaacttgcagttgaagaaattcgtaacgaaggtggtaatgcaacgtttatcgccgtgcgtcttccttataaagtacaaaaagatgaagatgatgcacaattagcattacaattcattcaagcagatcaatctgttgcatttgatattgcttcaactgttgatgctttttcaaatcaatatgaaaacttattgggtgaatcattaacagatttcaataaaggtaacgtgaaagcacgtatccgtatggttactcaatatgcaattggtggacaaaaagggctacttgttatcggaacagatcacgctgcagaagctgtaacagggttctttacaaaattcggagatggtggtgcagatttattaccattaacgggattaacgaagcgccaaggacgtgcattattacaagagttaggtgcagacgagcgactttacttaaaaatgccaacagctgatttattagatgaaaaaccaggtcaagctgatgaaacagagttaggtattacttatgatcaattagatgattatttagaaggtaaagcagttccagctgacgttgcagagaaaattgaaaaacgttacacagtgagtgagcataaaagacaagtaccagcgtcaatgtttgatgattggtggaaataaattaaacataaaaaagaagctaatcttcatttagcttcttttttatatgttaacgatatacccctactcttttctccaataaatcttgcaggcaatcttcatgttgtttacaaaataacggtggcatgtcgtctaacgggaaaaacttcaaatccagcgtttcatcaccatctacttttttgtcacctccaactattgagaatgaaaagaacatcacaattgactgagccttgtctccatttggatatgattgaaaatattttgtatacactccaataagctcatttatttctacatcatacccggtttcttctttgatttctcggattgcagtttccgcagctgattctcctatctccattgcaccacctggaaatccccaagcgttaaagtctcctcttttttgcagtaatacttctccttctttattaaatacacaaccaccggcaaagtttaagaaaacataatcatgtcctactttttcacgtaattcttttatataattggccattctctttccccttttcatacctcttctatcgctatttcttatctttttcaagcaattcaatgattcgatctagcttctggttcatattaatcacgtggtgtttctttgcagcactgctttgtaatactcttctaataaacaaagtaaatgatatgaaaaacaaaacgataagtccgattactaaacaagtatatatcaatgtaaaaatattactttcgaacaagttcattccacattcacatccttatccatttattctatcacacaattcttaatattcaaaagcaatcaattaataaaaaaagcaccttttacagatgctttttcccattgcttaatacgtaaatgtaattgtcgctaatgaataacccgccaatgcactgtaaggcgctacttgataagacacacgctttgcaccttttggccaatttatttcatttaatactttctttatatcttgcatcgttccatccatggactgcttatatcgcacttctactttttctggcttggctgcaaactgttgctgcaactttttcttaaattcattataattttctgctccgtattctgcagataagtattgtaaatttgtttcttttaacatctgctcatatacgacagtttttgagctaccagcttttattttatttgttaattcaccaaaataacttgtagttgccgctggatatttgctacgatcccattcatgatctttacttaactgttcgtcagacatattaaaatatgagtaagttacacgccctgctttatctggtactggatcatcaaatgtagtatctaggtgataccatttgttttcaatgttcactaaattccacgcgtgagcttgtccatttcctgtgcctgttacaatatgattttgaatacctgcctcttttaacaactcatacgttaataatgtatatccttggcaaacggcagaacgattcgctaatgcttcatatgctgtatacgcttgataagacgtatcataagacacatgcttaacaacgtaatcgtgaatagcttttactttctcatgctcatccatccctagttttacaattgatccaacaattgatttcgcctgagcttttacatattgagtttgttcttttgattcacggtattttacttgcagtgtaaacgtatagtcccctggcattcctttaatagaatatctagtagacgctacattatattttacatactcatcagcatctacaattttattaaactcaccatacaattgatccataatatttctagcatttctatcttttgttttatatgtgattgtaatattctcttctcgattatcaatctgtttttttaattcttttctgaaatcatctaataactttacatctgattgtgctgtcactgtagtcggatttgtagctgcataagatacagatgacgcttgtaagcctcccattactatagttgaacaaagtgcggcagctgtcacatacttacttgtctttcccatcttgtcactccttatattctataactatacgaaaaagtatcgtatagtttcagagtatacaatactttttcgtataggtcatatgagattatgcatattaactaattcacataaaaaggttgttctttttaaaagaacaaccttttttcattagcatgtttgtaatacgcagcatgtattttcaaaacgttgatttttcaaatcttcattactaatacagaaatatagcatccctagttctccccaaaccatattacaatttttatgatctgaatcaatttggaataaaagagtcatttgctgcgggtctactcccatatattctcccgtctcatataacacttcttcttgtacagagaatggctcaccaaacatttgatggttatcgtagttatccggaattagctcttcaagtaattgcaagaaacgatctgaatcagcctcatcttcaatgaaaagttctggtaatttgtatgtcagttcaaaagtaattgcacactggttatatttcgcttgtacttcatttcctcttcgtaattgctctacaggaacatcataataaagtacacccccagcctctgttagcttcacattttcttcaaaataattttcaatgcaaaagaaatacagcatccccgtcttaggaagattgtgatccataccaacgttttgtaaatcacttaagttaaattgcgcgataaattgtagtggatttcctttatgctttggatattcaaataaagctggtaaatcaggaactcctcccattttcgaactacctatcgcaacagtttcctgctgctttggcacaacttttatacaaggaaatacagtattaataagttcctctttcaagtgtgttagttcatatttatcaattaatacttcaatttttttattcataaattctccttacatttacatacttatttatatcatagtacaaagattatacttcattctttacaaaatcaacaagcctccaaaaaacgggcttatccttcgtacgcgaacaagtttaaaaaagcatactatacattgttcctacaaacacgatagttctttagttcttccagtacattttcccctcgttcatttttatttttaatataaggaggaattccacatgggttacggatatagttgcggcggttacggcggtagctgtggtggttgtggttacggaggtttcgctttattaatcgttttattcatccttctaatcatcatcggagctagctgttggggcggctttgtaggctgctagtaaacttaaaaaccattgtaaaaaagcacgtacaatacgtgcttttttgccatttccaaatcttttatttgaaaggaagtatgtttaatgaagattgatggtgtttttgaaggaggcggtgtgcgcggtattgcgcatgttggggcaatttgcgcgttagccgaaaaaggttatgaatgggaacgtgtagctggaacatcagctggtgcaattatcgcggcacttttagctgcaggatattcttgttcagagctaaaaaccattataactgatatcgattataataaatttacgaagaaaacctttattgacaaaatcccctttatcggaaaaggactaagtgcatggactactctaggtatatactctaatgtatttatagaagaatggattgaagaattacttcgaaaaaaaggtgttcatttatttactgatttaccggatctaaacaaactcaaaatcatcgcttctgatattagtaatggtaaaatggttgtctttcctgacgacttaccaaactatggatttttaaattatcgcttctctatcgctaaagcggtaagaatgagtagtacaatccccttcttctttgaacccgtaaaatggagaactccaaaatggaagcagccttgttatatggttgacggaggaattctaagtaattatccaatttggatcttcgattcacctaccgctcctcgctggccgactttcggatttcattttgtaaaagatgagattcaagctgaccctgctcactataacgagcctatttctatgttcaaaggactatttaaaacaatgatgcaagctcatgatttacgtcatttagataaggaatcaaaagcaagaacaattacaattccaacaggaacgattacaagtactaattttgaactgacgaaggaagaaaaagactggctttacaattctggttataactctgctaataaatttttacaagcttggaactttaggcaatatattgatgagtatagaaaaggaaatcaagaccgaaagacaaatcgattttttcgtcaacttgactcataatattattactttgcgtataaatacgagaacgtttaacaacttaatagtaaataagcctagtaaattcttatattactagacttatttacttcctatataatctcatacattgtttaaggatacgttaagccttcggcttcttctgcagttataactatgtaacgatttcccgttcttaatcctaacagttctgctttttcaatcgcctcttgcttcgtctccgcataagcagctaaatattttcctccattgatcatttggcaaattacatattgtttcattactttctcctcttactttttcattagttgtgcaagtttttttatacctatttcaatttcttctaacgttgcgtatgaatacgataggcgcaaaaattgatttgcacttctatcatataaagtacctgggtttaataaaaccttttcttgcagagctttatcaaataaactgcgatatgaaatgggtacttttatatgtacccatatataaaacccgcctgttggttcatgccaagttgctatttcacgaagatatttatctaacattagtaacataaaatctcttcgttttttcaattcacttcttacaaatcgcaaatgctcatcatatagaccatttgtaaaccactctgctgcaatttgctgggatatagtgcttgaaccataatctgtttgcatctttatgtctgacaatctttgaattactggctcgggtccaacaatccatccaattcttaaacctggactaattactttggacatgcttccaatatgtagtacgattccatttttatcataggcctttaaaggtttcgaactaggtgcatcaaaccataagtcttgatacactgcgtcctctataataggtaatccaatttcattacatatttccatcacttctattcgtttcttcgcattcatactaaagttcgttggattatgaaaagacgggattgtatataaaatagaggcattaaattgcttcttatatttcttaatatatgatgtatgtaacccgctttcatccattgggattccaattaaacgtactcctgctgattgaaaaacattaagcgaatataaataggatggtttctctaataagattgatgcccctttcgaaagaagccccatagaaataagttgcagcgcttgaattgctcctgaaacaattaatatagagtcaggagatacatatacgccatgctcctttaagtattcggaaatcttttcccttaaataaagatttcctttcggctcttcatacccaagcgtcacatttgactttaaaaggttattcataatttctttcatctttttctcaggtaagagactcggcgcgagctcacctgttcctaaccgaattacatgtgggtaaaattcagcttgattaatctcttgaatagctgggagattcggataatgaagtcctgtttctacataagactgccaattaggcgggggtgcgtaagttgaaacattctcattattatttacaacaattgttcctttcctgccattcccttcaatatatcccttcgcaactagttcatcgaaagccattacaattgtgcttcgattcacaccaaatgtatgggccaaatctctttgtgaaggtaatttcgttccaacggtccattctccattaacgatcctttcttttatatacgtttctatttgtttatacagcggcgtcgctagagacatatccggtttccaaacgaatctttccatcatatcaccttatattctttttggttggtaacctccccaaccatatggatggatacaaattttcatttcttctatacaatatacactatcataatgaattaaaataggaggtaatatgatgagtgaagcaattattcatggtatcattcttgcatttggacttatcattccattaggtgtacaaaatgtttttgtctttaaccaaggtgcgagccaaccaaacatttggagggcagcccctgtagtattaactgcctctatatgtgatacgttactcatattgattgcagtgcaaggtgtctcccttgtactccttactttttcttggctaactaactcattatatataattggatttttctttctcctatacatgggctttgttatttggagaagtagcccttccaacgatgtaacacaagaaaaaagtatgcccttaaaaaagcaaatccttttcgcagcatcagtttcgttattaaatccacatgctattttagacacaatcggtgtaattggaacaaattctattcaatacataggaagtgaaaaatgggctttcacacttgcaactattatcgtttcttggatttggtttataagcttagctttagcggggaaatttctaaaaagactagactcaaccggaaagacaattttattattaaataaattttctggtctcatcatatggggtgtcgcactttatatgttaaaacaagttatttattcttaatgaacgaaagagaattgcatgttactcaaaacatcatgcaattctcttacaaattatgaagtaggttccggtttctgttttaccgcctttgcatcctttgctggtttaatccaaatgattgctatgacagcaccaatggcagcgaaaatactagtcaaataaaacacttcatggtccgcccctttcatgaaaaaagaatataaaggtggtccagctgctacaccgataaatcgcattgaactgtaaaatgacgtaactgttcccctttgctccttttcaattccttgtgtaatgagggcatctaaacatgggagtgccataccaatccctatccccataataacgagacaaagaagtagtaaataaatcccttttataaataaaggaatgatgactgatgcagctgccattaaaaacccaatatagatacacttcttcataacattttgattatctccaatttttttaccggccatatatgaactaagtgacagtacaagtaacgggatagcaagcacacaccctttccatataccatgaatgtcatactttgattccagtatagtcgacaaataaaagagaattccgaataaaataagcataataattgcacctaatgcaaaaatggcaattaaccatcttcctttttctcgaaacgtagacagaatagattttataaactctttaagtggtggtacttctccttcttgtttctttgcctttactagaacaagtaataaaacaattgatactacgcataaaattggaatcgcccaaaatggtaagaaccatacaacggcagcaagagcagaccctaaaatagggctcagcactttcccaaatgtattggatgtttctatgattcctaaacctgtactaacttgtttttcgtctttgtataaatcaccaacacacggtataacaactggcattgcaccagcagcaccaataccttgaatcgctctaccaatcaatatccaattgtagggattatcaactttccaagatacccaaccagttatcgctcctcctatagctgcaatcagcaaactcggaaccattaccatctttcgtccccatctatctgataaataaccagcaatcggtataagtagaatggctacgatagagtaaattgtaataatcatggatacttgaaacgatgaaatatgtaatttcttttcaatagtcggcagaattgggatgagcattgaattccctaatgtcataacaagtggaactgatgcaagcgcaattaaacaacagttttctttttttaacatgttggcttcgaaacctttcatcatatatttcttaccatataatagccccgctggaacgtaacttttcattccaccagggctattacatctttactacttcccattcacaacaaaagaaattggggaaattatagtattattcctattctttgaatccagttcacaatatatccataccaattaattgaaaaaaaagaaaggaagaatccttcctttctcctataaccttctacaattagcgagtatatccgccaccaagttgttgttctgccatcgctacaaggcgttttgtaatttcaccgcctacagaaccgtttgcacgtgaagaagtatcagcgccaagttgtacaccaaactcttgtgcaatttcatatttcatttgatctaaagctgcttgtgctccatgtgatgctaattgattagaattacgatttctagccattaccaatcacctccttatttatatataaattgtgttaaattcaaattaaaatacatggaaatttttggttattttttaccataaaaaaagagcctctaaaacgagactctcacatcatttcacattacgaagttactacttctaattttctatttattaatactttcatttcttcttttaatatctcttttgcattatgtccaaaccattctaaggaagcaaaaagatccgtacctctcacttcctgaataatctcatcataatttacaataccttcaaataacggaaccataccaatacgacttcctgctgcagcatatacattattaggttcaaacacatgcaaataatccgctgaagatatattcttaaaatggtaatgtagtgtccacggctttaatcgatggaaactgtctattggatctgcgccagactcccatatatggagaaaatcaagatttatttttaaattcggatgatttacttcttctaatagttctatagtagaaggcaatgtgtctgttagtgtattgggatgtgtttctaacagcacatacatattgtgctgagcaaacacatcacaaatcttacgtattcgctttacatactcttttctctcttgttccgagaagtccttgctccctttttgcccagcaaacgtgcgaattttattcgtattaaaccaattagctagtactacaagttgttcacttttctctatcgttttttcaaaatctgctgataatgatatatctaagtaatcacttatcatcgtaatttctaagtttttatcctttagaaaagtcaattctcgttctgtcgtttcgcgttcttgtatatacaaattttgtgcatgagtcccccacaattcaattccttcaaaaccgttttcatatgcaaattgaacaatatcagtaaatgaaattaattgatgacgaaatgaaatggtacatagcgaatatttcatagcattaaactcccctatcttaaattcagttagcttattaaaaagttgcgacagactgatttgttttcatacctttccatgatagaaactgtctctctaattccttcttaatttgcagttcaattgcattcatttcatccagtttttcaataatcgatactagcatacctttattattcgtcattgccattttaattgcacgatactgtacatttgtaaatccttgtacaatatcctctacccgatcacaccaataatcaaattcttgctccgaatattgcaacgtttcacggaagtatgcaaaggcatgctcataactatatttacgaattgcaagtactggtatttgttttactgctgctacaagaccagaaagcgcatatccttcttcctcatttgccatttttacaattaaatttttcagttccatagtcagttcattgtcgttctttttgaatgtttctgtgaaataactagctactgtttcttgcgttggctccccaattccttctatatcaatgaaataacctccaccaaatgggttatcttgaatagagtgaagtactttttctctttccatatttccttcccaacgaaaatcaggatctagcatgaaccactcttcttctttctctgtttttgatatcattaaataatgtggaaacggtttttgatgaaatttattttccctctctggtaatagagacatatcaaccattacaatgacataacgattttccggcttgttttctactaattctaaaaacgtttctacattgctatctttatcttttgcatgatcataccattcgtttactttaataccgtacaatttttcaaaccaaagtaaataatgatcatggttaatgttttcagagtgatatgaaataattccgccttctgttatatcaaaatctccatcccatagtccaaaataaaatggacgaaaatcaatgtcgctacgcctttttataatttcacaaaaacaactcactaaacagtgcacttttattgaagtcatactctcatccactttcctaaaggttagttattcacatttacttcttgtaactcctccataaaatcaagcaaagatcctacagtaagaaatgcctttggatctacctcatcctctggaacgcatagctttatatccatttctatgtatacaataagctgtaacatcattaccgaatctatatataaatcttgatttaagcgcatcgtttcttctaaatgcgttacatttttcagttccattttttctatcataatttttaacacggcattctttaacgcttcccgtctcatgttgtaacctctcccatctctagtaactttctacttacttttccagttttatttttaggaatttcatttacactttcaatttcatggggaactttataagaaggtaagtgctgaatacaccattctcttatttgtactggatcaacatgagagatcactttcgctttaactatttcgcccatgacaggatgtttccctcgatatacaattgcctcttgaacaccttccaatcgaagcatcgtttcttctacctctataggaaagacttttaatcccgaaacattaattacatcgtccatacgccccataaaatgaatgccacgctcagatttataccctaaatctttcgtgaagatttccttatcattcattttcacgacgatttcttccggtgcattttcatctgaacctatgcttatactcgcatgaggtagagggtttcctaaatctaaatggctcttcatatcatgacatatactaatacaacctgcttcagaacaaccgtattgctgcatcatatatgttgtcatttcttttagtttataaaatagtgcttctggcaagggcgatcctgatgtcataattttatgaaactggaacgttcctaatggaaaactccccataatgtgtaacataagtggtactgcatatataatatgtttctctgtattgcgaactatatttaatgcgaatttaggatttttattcgtaatgattacaggctggctccccctcttaattgctgataaagtaccacatattagtccgtatgaatgtgaaacaggagccataacgattggcacttcatctacttcacagtttaaagcttcattataagcggtaatttccgtatcaacttccgtccatgctctacgaattagtttcggttcccctgtagttccagaactatattgcaataaagaaggctcttctagtaaaaagttccctacttctaattttgtaaaatcgccatattctccatataaaattcctacacaatttgcacgctttgccattttaatagctgtttcttttggtgtatcttcatgtataagtaatactgatgatttcttttcttttaagaaaaacacaatcgtaataatatcgaatggatctttcagacaaagtgcaaatctatttccttctgcttctttaaattgttccatttcctcataaacttgtaatctcgattcaaaatcacttttgctatactcttgtttattaacgattagcataatttccccctgtaacagctgatttttgtttcataagttgtcttactctatacaatggatttggaacttcatgaacaagcgattccagatccatatataatcgacgtttcgttaattgttcagcatagaatgtaggtgcatataattgaatattttcaaatctacctttcaaatgtggatatattcttaaatgattttcaatttcttcaacaaccatcatccaaaaatgttcttctttcaatccatattcatccgcaagtacgaatgctaattctcctaaattaaacaggaatagtgcatctaacaccatctcttgcaaacattcaatgcgatccatttcaaagaaatcattcatttttccattcgcatatgttttatgcattttagtaaagtcgggacatttgtcaaccgttttcaaatatggacgataaaactcaagcccttcatgaaaatcctttaacgcaatacgaacaggcaccccttctttatggactagaatcatattttgtccatgtgattccagtgcgatgccatgctctacaacaagatgtataactggtattatcgctttttgaataagtaattgtagccaatccttcattccatatttattcaaccacgcatcaataattggtgtaccatttttctctttagcgtataaaccattaaaaggaattgcatcttcttgtgcatctaaatacttatgaatgctttcgcgccaaatacatcctaatgaaccatatatagcttttttattcgtgtcatacgttacactggaaaactcatttaacaagattaaacgtgcttcatccattaaataggcgtcattacttacaacatcatttaaccaatttgatattgctggtgcactcacaacagagtatggtttcagcgtacgaagtgttgaagtgttgagtaaattcatcgataatttaacgtacggtttctttggactcgtaatatttcttaatgttctcattgactgttgcgcgcaataatcgtcctcagatgttcctaaataaataataaatttcccctgtatatgatccgcataatttgaaatgatgaaattcacccactgccatgggtgaacaggtataaacacgtactgttttggattacatcccttattacgaattcgttccataaactcttctaatttacgatcgccaatctcctcttttaaaaggttgttatacatcacttcattctcataacctataaatgctaacttaaatatgtacattaacgcttgaataaatatgtacattttcaattggattctccatactgactcattttagcaaagaaaatgattgattttgtacatgcttaaacaagcgaaaatgtacatgtttatcttgacatttacatcgcaaaaggtttgaataccttctttgtctccatttcccattcactcccctaatatactatttccattccttacagatctctgcaatctattgtactccagttccagcacttctctcccaaacggcgttaactcatagcacttctttctgtctgtagaggcaacttcaacaattaacttctcttttagtaatttcgtcgtatttccatataaagtaccagggccgagctttacttccccatttgtcatctcttctaccatttgcataattccgtagccatgcaacggcttcacgagtgacaataatatgtaatatgtcgcctcagttaacggaatatatttttgcgccttcccattcattataactacctccgatacatcgccttatgatatatcgacttacgatacatcgcatatcgatattgtataatcatattccaaaatatgcaagagtaatttaataattaaatatccatttctttgaattaaaaaaccatacaaattttctgaataatttgttaaaatatagaaatattagctcttttataatgaaaggaatggtacatatgataaataaattgaaagaaaacatcggatctgtgtttgttgggaaagaaaatgttattgatctactgctcgtttcacttcttgctggtgggcatgtattgctcgaagacgtgcctggtactgggaaaacgttactggcgaaaaccatttccaaaagtattggtggtagtttttctcgcgttcaattcacccctgatgtacttccaagtgatgtaacaggtattgaatacttcaacccaaaaacaagcgaattcgaattaagaattggaccagttatgacaaacattttgctagcagatgaaattaaccgtgcaatgccgagaacgcagtcgagtttgttagaagcgatggaagaacgacaagtgacgctcgaaaaacaatctacgcctctgccgaaaccgttctttgttattgcgacgcaaaacccaattgaatcacaagggactttccctcttccagatgcacagcttgatcgctttttaatgacgatttcaatcggttatcctactcctgaagatgagctacaaatgatgcgacgttttcggaacgatttaccattagaaagtgtcacatctgtcatctcattagaagatattttagaatctcaaaaacgagtaaaagaaatatttgtttcggaaccgttagaacattacattattaaacttgctcatgctacaagaaatcatgattatatcgctaacggtgtaagcccacgtgccacattagctttagtacgtgctgttcaagctttagcctttttacgcgggagagaatattgcacaccagaagatatacaattgttagttccttctgtttggaatcaccgtatcgtcttatcaatggaaggtgccctgcgcacgactaaaaatgatataatgcaaagtattttaaaagaagttgacgtacctgtggagattgagcaagcatgaatggacagcgtgttgtaactgtgcctttattttttcaactccatattattcaactaaccgttccaatcgcgttacttttcacattctttttcccgcaacgaatgcttatgtttctctttttcttctattatatatttgcgatttttatttataaatatgtcgctttcatagagaagaagtttcaaatcataaatgagaaacaaactacacggctttttcctgaggaatctggacagttttttattcatttaaaaaatggagccagcataccgctcgttaatggtgtttgttactttcatttaaattcgtcccttataccgcataaagagcaaggcattgaacaaatatcaaaaacattattctctttcccattttcacaacccgcacattcggcacaaaaatggggtttaacattaaccgcaacgaagcgtggtgtgtttcaaattgaacagtttgaatgtgtattaaaagatccatttcatctattaactgtacatttacctgtttttgataaattaaggactgaaattattgtgtatccttctcctaaagaagtagcaggtttgcaagaacttcagcaacttttgaatggattttatcgaacgaatttttctttttacaatgatgaaacatctattatcggtgtaaagcgatatgagcgtgagtctttccgctctattcattggaaggcatctgctaaaatgcaacaattacaagcgaagcaatatgaacctgtaaaaaattatagttggacgatttgtctttctttagctgccgatcgtggatttggttggaaagataatgtagaagaacttatttcatatgcaacatacattttccagtacacaacgaagcaccacattccgtttgaattgtttattagtgtattagcagaaggcggtgcattacatgtaccgttaaatgaaggacaaacacaatatgcaaaagctttagaagaattagcccgtatttcagatgatagtacgttacttccgaaacaaggattccttcattatgtaaagagaaagagagaacgatcgtctacaatgatatacattggtttacaaaaaaatgaactccctcttctctcgcagccaacgtttctcattactagtgaagggatggtggaaccagttgaaaacttggctatatcacattcatgatttcattctgctcctcctgctttcattattaacagaaagagatgaactaattagtattgcaatatttttaacaacaggctatattggagtatttcttattcataaatttatgcagaaaaaaacaacaggatttgtaatacttttagttcttcaaatcgttcttttctctttatttttacctttttctctttttggcacaatcatattaccactatttttctttatcgtacatgtggtcggacctggatatccagttcaaaaatctttaggtggtattgtatggtttgtcgtttcagctatattttatgcaccctttccaccgttgtggaaactattaatgttagccttgcatcttatgattacattttggttaaccggggcaaatcgcaaacaacaactattacgttttgcttctatcattacgattggcttaatgagtatattaattgttcaagtatttcctttcattcgacttatttttggttttataacggaagtagtcgcattaggcgtcggctatgctttaatgccattaattaaagcagcggaattaaaagatactgaagatgtttgggcaaataaaggacatctcttaaaacccaaaattgaagacggaaaaaaaattcctgattttgatccaatactcataaatagcgctacaataatagtctgtacagctatcgctatttacgtcgtttggaaaatagtaaaaaaacgaaaacatttaagtttaccaaatatgcccgccttcgaatctactatcattactgataaagaaggaataagccaaaatcgttttaaacgaaataaaccgccacataacgaaattcggaaggaaattttcaagctagagagtaagttaacctctcctttaaatagaaaacggggagaaactgttgaggcttggctagaaagaataaacgatgaagaagatgtaaatattcaaagtgatattattatagatgcttataatacggtgcggtattcaaatggtgcaaacactgtacttctacatgaatttatggaagagattcataagctttatgcatatcaaaaaagtttgaagaaacgaaagaaataacgtaacaaaaagactcctatattcataggagtctttttatacttctacgttgctttttaaatggaagcattcttccctgcttcaatttctaatgactcttcatgccaccaaagtgtttcttcaggatcttctttagcgatttggtgtgcttcttttttcgtttctactgtaggatatgaaccttttagcgcacgccctgaagtcgtaacgaatagtacactaaatacaactaatccaataatacttacacctgctaaataaaatgccggtgcgagcgggttaccagttgcatgaactaagtatgaacatacaagcggtgttgttccaccgaatatcgatacagaaatattaaatgagatcgaaagtgctcgataacgtacatcagtgaaaaagagtgatggtaataatgaaggtaatgttccttcatatacacttaagaagaaacctagtacgaaaatacctgcaaatatagctgcaatatgtccgttacctattagtaaaaatgctggaattgcaaatacagttaaaccaagtaaaccaatttgcacaacacgtttattaccaattttatcacttaatttaccgaaatatagtgctagtggaatcataagtgccatcgtaatagaaataattaataagcctgttgtttcttcgactttaagtacttgagttagataagaaggaatatacgaaagaatcatataatttgtaatattaaagaaggcgacaattactgtgcttaataagaagtcttttttgtgatatttaataatatccataaatgaaaattgttcattgtcttcagattcctcttgtgctttttccatctcttcaaagattggagattcatctagatgacggcgtaagtataaaccgaccaaaccaattggtgcagctattaagaatggaatacgccatccccagctgagcatttgctcatctgttaacaataacgtcaaaatggtaacaattaccgatgcagcaatgtaacctgagagtgttccaatttcaagaccactaccgagtataccacgctttttatctggagaagattctgcgatataaaccattgctcctgaatattcgccgcctgtagagaagccttgaatcattcgggcaactaaaagtagtattggtgcccatacaccaatttgttcataggttggtagtaatgcgatgaataatgtagaaagtgccattaaaataatagtagtacttaacacgatttttcggccgtacttatctcctattctaccaaagaatacacctccgattggtcgaacgagaaaggctgctgcaaatgtaccgaatgtaagtacaagttgcaatccactattatcaacacctgagaagaataattgacttaaaattaccgctaaatacgcgtataatccgaagtcaaaccactccattgcgttccctataccagtagcaattactgctttcctggcttgtttaggattgacaatattaacgtcttgaggttcaaaatttaaatcattattttgttgcatataataaaacagctccttatttaatttaacttctttaagcacaccttctcttattgaataaaattaattcgaagcacttaaggaaaaacaacgtctccttatctgttattattatttcacataattaattatttgtccaattaaatgctctttttctataaagttacaccctgtttaacttttatataatgacgtgtagcttatataatatatacctttacactacaaataaatctttaattcattagattgtacaacgtacctataattatttcctctaacttaaaaaccagtaacttttactgaaattttgcatatatttagaaaagcgaactcattaatacgaatttcttcttattgcattcaaccataaaaatatggagtatcattaaatacctaattagataatattattataattttctttttgaaggaggatattttatgttggagataatatttttgcttacttctttgtcttttctcttaatcatttctggttttttcatcatcttaaaacaatataaagaaataaaaaccataagaacaatattaactacaaaaaaagaaaatgagaaaactacatccgaaaactcaatccctatgcaattagatcttagtgttctcaataatttaatagcttctggtataaacaaaggttctaattcagttaatgaaaattcggaggcagataaaactaaataattgctatgtttgtaacaagaaaatatttatctcctattttatctattcttattaataactacctctgattaaaaaggagactacttatgtgtaaaaatccaatctctattattatccccatacagcatcaaacaagcgttttacccgaaattctaaaagcatgtcaacaactgaaacctttagaagttattcttattattaacggatgtattgatgattgtattgatattacacgatcttacagttgtaaagttattacactagaagaatcaacagaatataatatttgttatacaattggagcaaaaaaggcaagaggtaattgcctattatttttagatgaaaattacattattcaatcttccacacttatacaatttcttcaaccattactagacggatccgctgatgtagtattaaataatttggattattttttttataagaagcaacggcctaatatagcaatgatgtggcagcaagttacgaatcatttttttcatcgttcagatttaaatgttaactcattattatttcctccctatgcaataacaaaaaaagttctagaggcaattactccagaaagtttatcaaatccgatattggcacaaatgaaaattattaaatataaatttcagatttgcaatcatctaaaaatttatatacctcaaatcccctccttcccttcaaaacaactcacttgttatcatcttgaagctattgaacattggataaatatagcgcaagattcaagaggaaactacactgatagtagccgaaggcgggatattattttagggcttcaaaacggcgaacaaaaatatatgccaaaaataagtacaggtaaagaattttattcgaatacttatggggataaacaattatcggttatcatccctgttcaaaatgaagaaaaaacgatagaatctgtaatttatgaggtacaaaaattaaaacctttagagattatcattattgttaatggagcaacagataaaacagaggcattggcaaagaattgtggtgcaacagttattagctacaaagagccacttggtaatgatactggacgtgctgttggcgcacgttttgcaaaaggtgatatattattatttatagatggtgatttcttaattcctagttctgatctattaccatttgtacaatctgttcaaaatggtacagatttagctttaaataagttagagtattactatatgtatcgatttccttattctatcgtgaccgcatgtaaatatgttgtgaatttagcatgtaatcgaaaggatttagggatgggatccacaattgctgtgcctcatgcttttagtcgcaaatgtattgatacaattggttttgattcacttctttcacctacctcaagtcaagttaaaacaattttagcaggccttcatgtgaaaaatgcccattctgtcgatgttgataagatgaatcgtgttcgaccagaaaaacacttctctcaagaaggttttctttcattagcaacgcaacaaatcattggtgatcatatagaagcaatttcttacctcatcgaacaaaaaagaaacactgaatgcttttaattgtatattcttaccaccaaataatatatgaatttattttaaatatatagcaaaataaaaaagatggttgtaaccatcttttttatttttacattagatcaaaagaaaagtagcaggcaggcttttcatttctgtatctttcttaagaagtttgaaaatagaggcttgttaatgaagatgcaacacttaaatcatcgtttagcgagattgagaaacatgcaattaatggtaaagtaataacaattgatccactagaactaattacaattgtaggacttgtcccacatgtacccccacaatccactactgcatcaattccacttccaggggtaattgtaatcttaaggcacacatcaaaacaaacattattcgtagtacatgccataactctccctcctttctcttaacaatatatgcagttacttaaattcggatacaactctcttactaaatttaataaattaggtgcttctttaatattaattggatagttaattaacgttttattaaactatctaaataagataagaaactaaaatcatcctttactgaaatagctatacatgcaatgaatggtattacattgaaattagatggacattcatcattgcaccttacaaatatttctgccccaccatttggattaactatagattctaagcaaatgttaaaacaactcttgttgatgcaagacaagatattccctcctttcttacacataatatcaatttatgagaaaataataatatcgttacaactttattcaaccctcaccaatcgtgctattatgggcagtaaaactcccacctaacttctttgctacagccgaattttgaggtgggagttttactgcccgcaaatagtgagataaaataaactaaagaggtaaaaacttcttcaaatacatgaagagattctcaacttttaattacaatattctatcttcatagagcgtttgtttcatatatggcataattttattcttctctaaagggatgtgccctaattgtttatcaaaatataaatctaatttaactttatttacagcatctatcctttctaattcttgtaatccagttataaaaggctccaaatgatttttcatatcaaaatcagctgctatattttgcaagtaataaattggcggtacatagcctatcttattataaaatgcaataacatttattctctctgcaaacgtatctttaatttcttgtattgataagttaggatatgatagctgaaaaacttgtgtaataggagtagtataccaatttgttaatatggtttgaggattgttgaccaatgcgaaagtccctcttaaataacctgctaatataagggacataaatcctccacctgaacttccataaagtaacacattttcttttaaaatatttatctttcttattattttttctaaaattatcgctatatctttcaagtaatacctatctatcgttccttgcccccaacctaaagaaatttcacctaaataaagggttggatcattataaaaaattacagattcttcgaaatccttaatccaagtgtatctttgaaaaataggtggcgactgcttttcacttgcccccgaacccaaaataataagtttttttgattgtaatttcattctaataataaactcataatttattccttgccattctacacttagtaaaaacggttcttccatattaaaataaatgccttcaagttgctcatatgaaatatttatatttctcaattgattaatcgactgaatcacctcttaaaatagaaataaatctttaaaattcctatgcttcaataaatacgaaaggccttctaaatgatcaccagtaattcttaatacagctggcggatgccctattgtcgcgaagtgctcatgtggtcgaatacgatttggtttcattacatctacataatgaacacattctactttatatccttctaatattgcttttacttgtgcaatacatgatgtgtgaagagtatcccagccaattccctctaaacattttctactaatagcatgaggaaccgctacaagagatcccactcctaaatctttacggttacaagcaatattcaacatatatttatatatatttacaatatatagagggaatctaagatttaaatttaaatcgtttaaagcaatatcaacaccgtcagtaacagcttgcgttaatggatgtaaatcttttgctggaatagcaaaatcggcatctataaagagaagtatatctcctatggcctcctgcgcaccaattgcacgcccgacatcatgtcctaacgcttcttgatagacaatcactgttgctcctaattgctttgaaatttcctctgtccgatctgtcgatccatttataacaacaattatttctttcggttcaatttttcttgcctcaagaataacttgtttaatcgtcgcttcttcattttgtgctggtataataattgatagctgttttccattataaatagaagacttcattccccatcctttatggaaacgcaaataatttttttgtatttttagttgctctataatttctcttttccttcctccatccgtatagttacctctatcaccttttcgttgtaaccagttttctaatacttttacattttttttaatctcacgcacttctaatttagttaattcatttccagagaaagagtttttatttgtagatatattattcaaagaggttttagtaattgctgatgaggtgtgtactcgccaccctttctcaataagtgttgcttgagcaagtataggattctgtaagatgtcatatccaatgtcttcaattactttttttgaaatggcatatgacatagataacatcgaatcatactttaaatccatatgtcctaatacgtcatttaatacttttctatacaccatagcaatactcggccactctattttcattttttcaaaatatacggagtctgcgttattcaatattacatctgtttctttttttaatagcggctttaaaaattgtgctaactccactgaaaaaacaacatcttctccgtctaaaaataagacagcatctccattggctattcttgccccattaactggtgctttacatttgtttttctcttcaataacaacaacattactttcaacaattgtcgttattgattgtatagtattcattctattatcagctacaatgataatttctagtggttttaaataatttaatttctctaaaattcgatttaatttcgacttttgctctcccacgacaataacgactgacaattccactccttctttcacctctcttacagtctgattaggttttaccttttttatatattcaatcgtttcattcttctctaaagctgcatgccctgctttcttgtcgaaatataagtctactaaaatttgattcacttccgtattttcatccatttgctctaacccagaaataaatggtagtaagtgattttgcacatcaaattcacatgcgacattttgtaaaaaataaatatttggaacgtattcaatactcttaaaaaaatccgtgatgttaattctttcgccaaatttctcttcaatttcttctcttgataagcctggataagataaattgaaaacttgatttaccggtacaggtatccatttcattaaatttgtttgaggattattaactaaagctgtggaaccctttacgaaaccagctaatattaaagacataaatcctcccccggaacttccataaaacaacacatttttcgaatcaacttgcaactttatcaataatagttttaaaatatttgcgatatcttgtaaataaaatctatctaactccccctgtccccaacctaaagatatttctccatgatataaagtaggatcattataatatataacagtatcttcaaattcttccatccaagaatgtctatgaaaaataggtggaccaattggttgttcttgaaaaccacctgctccagagccaaaaacaataacattggaagcattatgcttaatacgaattaaaaattcataagctactttatcccaatcaattttgagtataaaaggttccgtagtttgaaaattcatttgctgtaattgttcatatgaaatattgatttttttatactgatctaacagtttaatcacccttcccatctatctaaaatatacttacattttgctatgattcaacaaataagagaaaccctccaaatgatctcccagaatgagtgatatagttggagaaattcctttcgctacaacattttcattcgggcggagccgattatttttaattacgtctacataatgtacacattctatcttgtaatcatttaaaatagcgtttacctgcgcaacgcttggacagagtaatatatcccatccgatatcatttataaattgtttactaattgcatgtggaattgctgtaagtgaacctacacctaaatcttttctatcacatgctaagttcaacgcgtatttaaataaggtgacaatatgaaggggaaaatgtttacataaaaagggatttaaatcatttaaggcaacatcacatccatctgcaatagcttgtggaaatggatatagatcttttgcagaaacaacaagatcaccatctaaaaataaaagaatatctccctttgctgctacagtgccaattgctcttcccacatcatgccctaacggatttttatacgtaataacagtagcaccaagttgcgtagcaacatttgctgtattatctgtggaaccatttacaacgacaataatttctaggggctcaatttttctcacttcacaaattacttgtccaattgttgcttcctcattctgagcgggtataattacagacaattgttttccgttatatttttgtgattgaattccccatcctttttgtgaaaaagggatggtattatgttttttaagaatatttacaagttttcgatttcttgtaacatcatgatacattcccctaattccagttttcattaaccattctgccatagcaactaagtgtttgttcatatttttcttttctatatctactaatgatctttcatttaatgctctttcttctaaacaaaactctttagccaattgtgtttctataaagtaatggcaactaaactttttttcttcttcaataagtcttatttgcgccaaaacagggtttttaagagtttcatatttaatttcttgtaaagctttttttgtaattatatttggtaaagagagcaaagaatttatttttaattcattcgctcctaacacttcatttataatttgtctccaaataatattagcacctggaaattcttttttctgtctttcaataaagaaagagtgcaagttatttaaaaccacatctgcattatctttaatagcaggttgcataaattgtttaagttcacatgcagaaatactattactatcatctaaaaataacaatatatctccttttgcttcttttgcccctataacacgcatattttctgaatcacttctaatacatttaactccagattcagttagagtttttttgtttatgtttcgcttctcatttattactataataatctcatatggaaataaacttttagcactctgaataatttcatttaacaaacctatttcatattcaactaatatgattatggaaagtaatttcttcatttttacacctcaccaattctcttatataactcattgccctaatctaacttttctattaagtaggagagtgcttcaatatgatcacccagaattcttaatactgctggaggatgcccagtgtaatctacatgttcttttaaacgaattctattcggctttacaacatctacatagtgcacacactctactctgtatccttgtaatatagctttcacttgagcaaggctagggcataataaagtttcccatcctattgcatctaaacatgatctactcattgcatgtggaatagctactaacgaaccattacttaattcaggacgattatatgctaaattaagcatatactttacaatatcaacaatataaaaaggcggatttaaacttggatttagattatttaatgctatatctacaccatctgagactgcttgcgtaaagcaatgcaaatcacttcctgaaatactaaaatcaccatcaataaataagagaatatctcctatcgcttcaagtgccccaattgcacgtccaacattatggccaagtcgctcgttatatttaataacagtagcaccaagacttttagcaatattggcggtattatctgttgacccatttacaacaacaataatttctagcggttctatttttctagtctcaagtatcacttgttctatagtttcttcttcatcctgcaccggtataattacagaaagttgctttccaccataaattgaagaatgcatcccaaaaccttgatgataacaagggtattgttttaattcacctaacctttgaataatatctcttctttttcctgcatcagtaaaccctcctcttctccctttttcctctatccctttagatattccaattagatattttttcactttctctttttcattttttgatagttccttttttattaaatatcctttttcttctaaagtttcatctttagataaagtgtttattgcatattgatcgctaatccgccacccttgactcacaatcttgatatgagaaagaatggcatcttctataaaatcacaaccgatattaaccaatacttccttcgtaagcacatatggtaatgaaagcattgaattgcattttaaatctggccgacctaaaatttcatttaacatttttctccatacaatatccacattcggacatttatctatttctataaacttatctattttattcaaaattacatcagcctgatttgtaacaattggttcaataaatcccttcatttcatctgtagataatgaaaatttaccatctaaaaataataaagcatctcctcttgcttcctttataaaagcttcatatccgcgataatgcccactatatttctctgtcaaaacaattcggcatctatatttctttgctatttcatataatttacttctatcattagggagcataacaataatttcaattgggtttagctcccatacatttttaattaaatcttctaatatttgtgctctatcactatacgaaataataactgttaatgatctcattacaatcccccttttttacacaccatgtggcatcattaatatgaacataaaatattaagtattactattccctctaaatttgctactttatcaatatattcaaaaatggattgtactgtgtaaaaacaaacgtccatttttttgaaaatatatgctttacgcttttatccttcccccttctaattatgtatattacaactctcgccttttaaaaatcataaaaaaagtcctaattttttaggactcttttttaagttaatttatcaatatgattaattttatataacactttcttccaggttatacccctatctgttgtagtaaatatttcttctttactacaagcccagccactatgctcatttataaaatgtaaacaaaatacattttttaacaacggattacttgataattttatccattccgatgcttttttctttacttgatacacatctccgttctcactatttataacccaaccataatgtgcactgaaaaaagaaatagcaactttactagtgtttatttttcgatttggagtatgccatgtattacctttatcaaatgaataatttataaaaaatatattatcattcgtttttgttggtatcgctaacaagttatttttatagatcgttttataagccatggaattcccgttattaacctcttgaatattctgattgttttttatagggtgccaagttctaccaccatctatcgttttatatatcgttgattctttatattttttttgtagagaaataaaaccaactaacctatttataaatgttacacctgatatactatcactaatatttatttttcttattaccttccatacttgtcctttagttttcaaataatacaaattatgctcaaatttattcgatgcgagttttctagatattataatccatatactatccatattcgtggcatgcaattgtacctgaacatcagtcgatttctcccaattttcttcaattggtaaaataaactcactccatttttcccctctgttaactgtataaaatatagcaggcactagattatcattcgtttttgttaaaccatatgcccaagagcttcgagagtttatcggatatatggataatattatagaattaagaggattgacaatatcccattcttcccctccatttcgagtaaataaaatagcttgctttttatttgtatattgaataccggcccacccaaatctatcagttctcatttgtaaggacgtgaattgaatatccttgtattccaacatatcacctcattctcattatatttatattcgtatgttatttttttgaaaatgttctagcattcttattttttggctttttaccagacaaatgtcgtctagtaatatataaattactaaataaaataatgcttctgaaataaaacttttaaaattcaaatcaataactcaaattattccccttttagacacatttttttggtagatgaagacatactattttaccaatcacaactgaagaaataattaagaatatttcatagctactgatatatttatgaaaaaaaaactatctgtataaaagatagtttttttttcataaattacaattcaaaaaagaatgtattctgaagagtagaacttgaaatttatttttaaacaattgttaaaacagctactttaaccagacaagaaataaactgattaataaatgcatcaatttcctcttttgtaataatatacggcggaagtaatcgaataatattcccttgtgttacatcgactaacattcctttattcattagctcaacctgtaatttcttcacattttcattcgtatcattcagactaattccaaacatcatgccagcatgacgcacttcctgaatataataagaattttctttctgaatgtcttgcagtttgtcattcaaatatagtgacgtttcataagcttcttgcattaacccctcatcaagtaatgtatttaatacagttaaacctaaagctgttcccattgatgaatgagcaaatgttgtcccgtgatctcctggtgaaaatacatcacataacttttcacctacaataattccccctagcggtatcccgcctcctgctcctttaccaatttgaataatgtccggtgtaatattaaaattttgatacgcaaacagtttcccggttctccccataccactttgaacttcatcaacgacaagaagtacattatatttttcacataaatattgaataccatgcaaatattcacttgataaaggataaatccccccacttcctaatacaggctctagcataatcgcaattgggttttctttaataatagtctcttctaattggtctatattttcgcgctctacttcgtatacaggaatcgatgtttcagggaaattttgatatacactttcttgtctcgtaaaatgtagtgcccctaacgtacgcccatggaaactattctttagcactacaattccttcacattcttcattcatattagctctatatttatcaattaatttcaacgtcgtttctgtcgcttccgtacctgagtttgtaaaaaagacctttccgttttttaatgagcaatccactaatttcttagcatactcaattgcaactgggtttaaaaaatgaaacggcagatgcaacgattttgtaacttgttccattgttgtttgcacaattttcggatgattataccctaatacgtttactccgacgccagaaaataggtctatatacgctttaccatccacatcataaagcttgcacccttctcctctttctattgcaaccttcgtacgacaatacgtagacatcatatattccttatctaattgaaaccaatccgacatgttaaattcctcctagttattttccctgtttatttatgtttattctctataaatttatttttcagattaaaattttaatagtaattttcttcacgatattcatttttccataatttcttctatttcaacaggtccactacatgtgcatttttttcatctagcggtctgttactactttgcatgtcatacataatcaaggttataaaatcatatttagtaacaatagacgaaataaatttggaggctatatcgatgaatgaaaactatgataaacaggggcaatctttactagggaatgactttaatgaagatagagaacgtaatgaacaagctacactccactcacaaacagttggttcacgtggacctgttctagagcaagatagtgtacttcacgagacgttacaagaatttattcatgaaaaaattttagaaagacctgttcatgtaaaaggatttggtgcgttcggttattttcaaacgatatattcgatgtctgaacatactaaattaagttttttacaaaattctaatgagaaagttcctgttatggtgcgattttcgttagctgttagtacgaaaggaacaccggatactgctagaaatgtacgcggtttttctacaaaattttatacaaaagaaggcatttttgaccttttatgtaatcacattcctgttttttctgtccgtgatccgatgcgtttccctgaaacgattcaagcattattgccttcacctaaaaataacttaatagaccctaatagattttggagttttgtcgctaaagcacctgaatctattcattttgttgtccgtttatactctaataatggtacggccaaaagtcttcgccacattccaggacatagtgttaatacatatgtatggagaaatgcggaaggtaatcgaaagtatgtaaagtatcattggtacccgtttgaaggtgtacagtacattactagtaaagaagcaattaaactagctgccgaaaatcctgattatagcgggaaagatttatatgatgctattgaaaatggtaaaccagtggagtatggtttatacgtccagctcatggatccgaaagatgaagcgcacctttcttatgatcctttagatgacacaaaagtatgggatgaacaaacgtatcctctcataccagtcgggaaaatggtattaaataaaaatcctgaaaattttatggaacaagtagaaaaagtcgcattctccccttctaatttactggatggtgcagaactatcagatgataaaatgctgcaagggcgcgctaacatttacagtgattcacaaagaagaagaattggtcccgaatttcgtaaattaacgattaaccagcagcaagattggacacctgctaatcaaattacaaccggtgaaggaaggtacgttgaaggtaaacttgaaagaacttctataacgaaacaggataactttacgcaggctagtgaattttatacgaagttacagccaatagaaaaagaacatctcgctgaaaacttagctagtgatttgaaagttatatccgatgatattaggaagatcgttttggggtatttcaatcgagtatccactgatttgaaaacaaacattgagacaaaaatgaaagagcattaagaagattaaaacatgctttacgaatgagaattcaaatctatattaattattttcttatcaaaatccaatgagattatttaatttaaaaatgtaaagccaatatatccctgttctataattagaacagggatatattgaagtagtttaatgtttaacattaaactactttatttcgctacaaaatgcgataagtagcctttcaaaacaaactatagtaaactattttacttgtaccgtataattccctgttccaccaccatacttatatacacttaagtaatatttccctggctttgcattataatttccaagcaatttgtttccatcacgttttgttgcataagctacataattatttagatctgattcagaatataatacccagttcaatccaagattttgttcgttcgtaaccgaaatttgtaaatctttttgatcctttacatcaataacaaatttatccccctgatcttgatcgctcaaggttcctcttaacaaaatattcaaagatagtgggtttgctgtttcaaatgaattatttggttctttttctacagccgtaccttcttccgtattcactccgctaaacacaacatcatattcaaattgcccagcattatttacacggtaatttacaaaataagcagtcaatgttttatatccagtccactcttttcctgaaaggcgtttcaacatatcatttgttgcttcattcatcactttccagtcctcaacttctcctttagccgcacttcctgtatatgtcccctgtagtgtaaatgtattaaagaattgtgatttattctttgttactttcacatcttttagtttcgcttcattcgtaatatctgaagtaacgtccgaaagcgattttggatcatgctgagttaaatactcatctgatacttgtggaattgtatacttatcacgattatcaataagcatttgcatataagattgatattcttcatttaacttattatctttgcttaatgtagcacggtattcatcgtaacttgaaacatcatttgcgcgaattaaatcatgtactttatcgaacatttctgggcgcttattatacatatatgattgtagtgcaaacgaataattataaaaatcccacgttccatatttcgcatttaatgtttgtgatgctgtataacgttttgtaggatcattagataacccaccaattatactttttcgtggtactacactatctaatcgcgttgcacctgcaaagaactctgcattcccttcttcaaaccatgttaaacgttcattttgatacatttccccttggccccataatccctgaacttcgtaccttccctgtaagtagtgcgtaaattcatggcggaacaattcttccagactataaatactttgctctggtgtacgttcatatgtaaagaaagtccctgtcccttcaatataaatcccaccattattcgtttcatatccgtacagttgacgattaaattgatactcatctgggctattataaataaccatcgttaacacatcatcagcatgtccactttcaagtggtttatcgctaccaactgtacgataaaattgagaacgcacttcttttgccgcccagtatagacgtttaattttctcttcgctaactttatccccagctttaaagacaattgcaccatcatcaaacgtatacgttttcggtaaatatttctttttaccctcttctcgaatttgatctaaatttacagtttttccattcgcatctattcctccataatttgtagtaatttgttctgccgcaacaaagtattgctctcctaaatatggataaattcgcattgcatctgtagcaacttgttgtccttttgtcggcgtgctatgaagcttgcccaatcggccagcatagtaaattccattattaattaaccatccgtttttatttgttactgtaccaagtagtgcaaaacgatttatttcattaataaagttatcgatatttcgataccacatcgtatcttttggctcttttccagtcgtgtacatatccgtctgaatatcaaagtcaattcccttcatcaactcatatatagcgtctccttttgttcggtcttcaatgaaagttgcaagattatcgttatattgtttaaaaatttcacctgcatataaaaccgtttcaacatctgctgatgcatttccaattaattttccatatgatgcaattactttattttgttctgatgtaccaagtttgaaatttggattttttgcaattgtttttaaagctggtaaacatttatcatggtagctacgctcatttagtttgcttaattcatcatggtaaaaacctaaataaaatgctgcacgtagagcttctactaatgtttcaattccttttgaatcatctttcgtataagtttgtccttgttctgctagtttattaataattgcttgcattcgactatcatcttgatagaatttaagactatcactattaaactgaaataattccggaatttgataccatttaattgtcacaagaagatcagttaattgtttgttatttaattgatttaactcagccattgaatactttttttcttcagctaacggtttaatattatcggttggtgctagtggacgctgcgataaatccgctaattttaatcgttttgtaaaagatgcattttcttgtacttttgaagggtgcgccaattcatcaacagatttctgtattcctaccggctccatttgtaatacgttcttcacatttttctcttttgtctctgcttgaatttgcaaaccattacatgttatcgtcactagtcccacaccaagaatccacttagaaattttcgaatatttaaccataccattgccccctaacaatttaaaagaaaattcagaattttaaaaccaaaaaaccacttatttgtatgtatttacagttccgccataaatacaaatatgattaataatgcaatagtagcttgttttatactattacgagtacagattccttacatacaatctcccttccttacatgtaatacaagcaaaaactgtgccaattatatttcttatgaatagccaacattttttataaatactgtagaataaaatatacataggtgattcggcaatgtataaatcatttgacacaaaatctaatgtttatgaagaacaaattcattgaatgctataagctcattagccagtaaataaatttcaactaacaacatcccaatttttaaatctctcaaacaaaggtaaacaaacatattccataaagctaatatgttcgtttacctttgttatttcatatcaacagcaaaatatcgttgaataaaatagcatgaataagtattttgttattcatttctctttttcatataatctttttcacattgcaacggcttgaatttcacttttttccctttcttctttttcgtttttataacgagccattcccctttttcaacgtctagttttaggcttttcattacattgatattatcttgttctttataaagtaaaaatgcttcttgcgccctcacaaataggctgggctgttcgctaaatctaccactgtcataaattttagttagcgaattataataagaatcattttcctttccaccatacatcaaatgggcagcctccaaatctcttttacttacttcccaaaaactatgttcatcaatatttaaattaaatgtggatttaatgtcctgtattatattcttcacatacttttcatctctaacttttctttcttcgagacaatccgaagataactctggtgcatctgattgggaatgtacaacgtgttgtatcgatacacacagaataaatacgcttaaaatgtaaaatatttttttcatatttacatatcacctcaaatgatttagatactatatcatttgaggcttacaatattcttatgctaataataagaaagatcctataaaataaaatttttataggatctttccttttaatattgctttatcaaattcacgggcggggcaactaccttactacttttcacatcatataatcctataggtgttactcgtataaaaggcaagtgcgtcgcagaaaagaataaaattgtaaatgctggatcatcatacgcgtagccacgctcttgtagtaatttcaccatctgtttctcttcctgtattaattctctcatttttaaattagacataatcccgagcaatggtaatgctatttcgtgtaacacttcattgttttctactatgaccattccaccaccgagctcttttactctacgaaaagctgttagcatatcttcttttctttttccgataagaatgatgtcacctgtaccagaataagagctagcaagcccacctagttttttcgcaaaacctttcacagctgtattcacttgccaactgccatcacgggcaatcatcataaggaaacattcatcatgatctgtggacaattcatcacagtctatattgatttcactagtgtatggttttgtaataacgttatttaataagtgtatccccgttttattagagaaaatcatatcctctttttctattgaccaatctaatgataatggagttactttatgtttactccagtctatatgtaatgcctcatgtgtatttacaccgtcacgcttcacccatttcccctttgcaaggacactaattggtactgggttttctttactttctaaaatattgatattagcaattctacctgtcgcaatcgaaccatgtacatgttccatattataataacgagcaatattataacttgccatatcgtatgcatctattactggcactccttgttttatcgcggtagaaatcataacgtttgtcattccattctcataaaacgaaggatgtgagccgtctgttgtaaaaaagaatctatcaaactgctttacgcctagttccaacaattctttcagtaaaacttctaaatctgggcggattgaagaatttcttagggaaacagtgtaaccttgcataagacgagtgaaagcttcctgccctgtcatcgcttcatgatcacaatctgtacctaacagttttaacttcgctaaagtcgtttcagatgcacctggaaaatgtccttctactttcttctgcaatcgcttcgtttcctgcatccaagttaacatttcatcatcgccatgtaatagttttggccacgctgttagttcgccgccttgaagaactgctttatgcttaagccattctattatttcttcacgattaaataaagtttccccgttttgcaattcagtttgtccatcaaaacgacaccaccaatacatacttgctggaatcttttcaaattcatctaataaacgaaatgcttcttcacgttgtaatgtgaaaaataaagttaaattatcattaataaaagttgttgtcccaaactgcatcgcatgattcgctaaagtttcaggattatataattgatacggatgtgcatgaggttctatgtaacttggaactacatactttccatcacaatcaatgacttcacattcatgcagttgcactggcagcttttcccctacataaacaatccggtcatcatagatccaaatatttgcttgcatccactcgcgcatataggaatttaaataagttgcgttcttacataaaatgtgcggacttcttttaccatctattacttcaacatgttctcgtaattgtgtgttactccatctaaactgattttctcccaatgaatttcactccaaatcaatttacttttatttattaaaataaaaacaattaacaaactaaagtattctccattcataactcccctgtatatcccctatacctttcattatatggaatgattgcaaaaataacaattttcaaaattcaaaacacacctctttgattctcaataaaaaaggatgtcgtgtaaccgacatccttttttaccaccagactataagtttgaattacacttgatgccatactatgaatactaatactgcccttaaaacaggatcccatttacattcttttcatttatttcttaaattcaatttgcatcattttattaaactgtgtaagaataccagccgcacctaaagagttaacattgacagcaaatgtatgcttgcctccaattactccgccagcaaaagtcataaacccaggaattgctcctccgtgaccccaaactgaaacaccgtttggaagtttcgtctcatagatcccaaggccatatccatcaccaagatcttttccttctattggaactgtagtaagcatttcttttagctcgcgttctttcaataacttaccaccgagcaaagatgaaaagaacttatttaaatcgtccgcatctgaaatcatatctcccgctgaattagctaaactcggattataatacgtcatgtctttcaattcacttgtttcgtcaattttcatataccctcgagcatgattctttcctgggatgactggtgaattacctggtaaaaacgtatttaacaagtccaaaggttcaataattcgcttttcaatttcttccgcataactattaccagttattttttcaataagcattcctagtattacgtatcccgtgtttgaatacgaccaacctttacctggcgaaaaatctggaggtagagcaagccctatttccactatttcttctgctgtatacgtttttttcgaattcataatgtcagcgtcttttgactttaaatattcagctataccacttgtatggttcaaaagttgacgtatcgtaatttgattgccatcatatccatttccttgaatgaggccaggtagccacttttcaatagaatcgtcaagttgtacacgattttctcctactaattgaagaacagtcgtagcagtaaaagtcttcgtcacacttccaatccgaaaacgataatccgatttcattggtttcttactatttaaatccgcgacgcctgcagtataactactaatctttccattgtttgatgccctcgctaatacccctggtgttccaagctgtactgtttcctgcattatttgtttccaactattccgattcttttgatcctgtgcttgtgacggactagaaatattttgagtagactctgctttcacattaaaacctggtgcgaaaagagtagtacccgctattaaaactgcaaaacttcctaactttattgaagtacattttttcataaggttctctcctctatccatatcgtattgattcaagctacactttcatcttatataataaatctctcttttttcttatccattccttacgaaatacttactttcaaaattagacgcccagatgagaaaaagtaatgtatgaaaataaaaaaagaacgtgttttcaatttatcaaaacacgttctcttacatacttaaaaccctatatcaactttttagttcattcacttttaccatcctgcactagcgttcatgccattcccgataagagtaagtagtaatggccacagcactggggctaacgtaagaaatagattaaacagtataagtattctatatctcccaggaatattataatttttacgattaacaaataatacaaaaactaataatattatggtcgttacaaataaaagtaacactaacaaccaataccaaaccattaaactaagactccatggctgtaatagctcgtgtacaataccaaatgtgattcccaatactgcaaaactaaaggtagtaattgttgctttgataaacaattcacttaattttttatcgtatgtatacttacaatataaatctattaacgtgtataaagataaaaaggccattaatacacctacccaagacaataaccaatctccgtctcctctaactaacataaataggaaccaacacatccctgctgcagaaaaaataaaggaaaggagtatgtttttcaataccggtttcattctattttcacaccctcacaaaaatttaaatataaattatattttttatttacatgatacccgtaatggattcatcactttttcattctatattgatgaagtgaagataacctcaaaaaaaattcaacgagcaatactttactaaggctacctttttacattggtagagatataaaaaagtaagtatacattaccatgtaattaaatataagtaaatgaaattaatttacagttaatttcatttacttatattaatgtcacgccttcccgtctcgctctatccatcgtacagtcttctctacatctaactccgtatacgtcttttctccatatcggacagactcatatatcggaataatatcttgcgttctacaaattctgcttaaccattgttgcatcgtttcatatgaccttctctgttcatgaaacggtaatgttctttcccattccactaacgtttgccttatcttatctttaagtaacggctgttcaaactgatgcttcactttcttgttcttttcggttctatccatattttcttttgttatcgattgtttatcctgttctatttctaatttcgttacctttctcctcgttaatttataaaaagcatagagaatgaccactgcaataattacataaaaaacgacactaatccatgcatttgaaagaacagaaaacacatcagtccatgaattttttcgtacaaaaagtggaattttcctatctatttttgttcttgtatctacaactcctgtttcttcatctataattctttcaggttcatcaaactgttcatctaaactagtaaaatcataatttctttccgatattgtctccgtcttactagaaaaaagcccttttactatgtcttgtacatgcacaacaccttgtgataacgttatcgcactaaccgtaaagaaaagtatcatgaaaactctaatactccaaaccttcaccttcatatgtcgctctttattagccataacataaaccccttcttattctttaattacgacccatttattcgttctactgtatttctttggggaagtaccaagaattaaaggaactgcatccaattcttttcgccgaaagcctgctgtgtaaaaataagtagacgatacaggagtatcttggtccgatattgaggcaagtacttttaatacattttgcaaatgttttcggttatgaccgttctttatatgtagcaaaccgttatcttttacgctattgatccatacttcaaatgaacagttttgcataagcagttgtttacatatgcctgccgttaattcaatgagttcctctgtatcatttcgcaaagaaataccgcttttattttgcaagttgagatatatcgcatatttatctgattgtgttcgctcgtactttttcgcggttatcgtccctgttttcgctgttgcactccagtggatagaacgaaaatcttcattttcatacgacttcactcccattactttcgtttcatcatataagggggatgacatcgcttttcgaaaccctcgtgaccattcttgcaattcaggaacttgcattttcggaacagctggtaaaactaaataagacggcgttccaacttgtttatacgttatatggttcgttatgaatccaaagggatccgtaatgacaatttcaacttcttcccatttcgcgatgcctctttttaacgctacagcttgcaaatcaaatgaaactgactcccttccttttaaattaaaattcatataataatttgaacctgtactataatttttgtttatttcatcatgattccaagttagcttattttcacatttaaatcgaaatacgatattaagaataggaaatatcgacttgtttgaaattttcattttgcacatattcgtttcacctataaaaacattcgaactcccttgactgtattcccattcaacacgagatactttacgtatatatacatgcatagcacctattaaaattacatataaaaatacgagagataaaaacagtagattgcttgaaaatacacttaaaataacggctacaactgacataacccccattacgaaaggctccgctaaaggtgtatacacaagctgttgattcatcgtacattctccactagcacactaatcgtatgaagaatttctttcataatttgttctttcgtcgttttcatctctccctcaatcgttaacgttaaacgatgagcacaaacggatgcagcgagcgtcttaatatcatctggcgtacagtaatctctttcatttaatattgcccgtgcttgaattgctctcataaatgccaacgttccccgagggcttacaccaatttcaattaactcatggttacgagttgcttcaataatttcaaggagataatcttgcacatcattccctactaacacttctcttgcacgcttttgcactgtaataatttcttcagttgaaataatggaatgtaacgtttctaacggatcatttgtttggaaacgattcatcatctccttttctgcttctcttgtaggatagccttggcgtatagtaagtaaaaatcgatctaactgagcatcaggtaaaggaaatgtaccggcggattcaagaggattttgcgttgcaattactaaaaagggttctggtaatgaatgtgtctgtttcgcaatcgtaacagtacgttcttccatcacttccagtaacgaagattgcgttctcggtacagcacgatttatttcgtctactactactatatttgcaaaaataggacccaacctcgttttaaattcggattccttcacatcaaaatattcaagaccaataacatctcccggcaaagtatccgctgtaaattgtattctttgaaatttagcgtccacacttttagccaagcttttcgctaacgttgtttttcctgttccaggtacatcttctaataaaatatgcccccttgctattagagcaatggctgctagttctatcgattcgttttttcctataataactttcgaaatattgttagtaattttctttaatgtactcatatagtaatctaccacctttcaattatctaaaaattaagaatatattttttccaaattataacatgtatttcaaagatgaaatagagtgaaaatgaatcttttattttttcttcattgcacgcaaaaaagcacctattgtcgtatattgacaatgaggtgcttaactcaatccaacacccttctttccctctaatttttagtaacgatacatccttttttctgccacgcatgcattgttttcaattaactagtaaaatgcattctaatattacatataataaaaaacatttcgatttgttcgttatagaacttcctctacatcgacactctctatctttacttcatacatatttgggatacttgcttcttttggtacccatgcataataattttgatcattttctaatataaattgaactaactttgtttctgaaacattccagaaatttttaagattatcaatgtagtcttctaaatcttctttatagtccagttcgaagtggctaaacgcggcggactgtaaatccgctccttcgggttcggcagttcgaatctgcccccctccaccattttctttaaaataacctgagagggtttatttttttgaaaagataaccatactagtaaatattaatgggctatagccaagcggtaaggcaacggactttgactccgtcatgcgctggttcgaatccagctagcccagccatttacgagccattagctcagttggtagagcatctgacttttaatcagagggtcgaaggttcgagtccttcatggctcatcatttttgcggaagtagttcagtggtagaatacaaccttgccaaggttggggtcgcgggttcgaatcccgtcttccgcttaattaataaggggccttagctcagctgggagagcgcctgccttgcacgcaggaggtcagcggttcgatcccgctaggctccatctaaataaaaaagcttacatcatatgatgtaagctttttttgtgtttaaaaagacaacttttatacttgtcgtttaaaatgaagaaaacgtaaaaataagggatggggagataattgtgaaagttgttattgcatctgattcatataaagaaagcctaaaagctatagaagtatgtggagctattgaaagaggttttagagcaatttttcctaatgcagagtatgtgaaaataccaattggagatggaggagaagggacggttgaatcacttgttgatgctacaggggggagaattatatcaattagtgtgacaggaccgcttagagaaggtatacaagctttttatggcatttctaaagataaaaagacagcgtttatagaaatggcagcagcatcaggattacagcacgttccagttgaaaagcgcaacccacttattacaacgacaaaaggaacaggagaacttatattacatgcgctagatcaaggagtggagtacataattttaggacttggcggaagtgctacaaatgatggtggggcaggtatgttagcagctttaggagtaagatttataaatgacaagggtgaagtaatagatccatctggaggcacattacattcgattgttgctattgatttttcacaaatggacccccgcttaaagggggtaaagatagaagcggcatgtgatgtggataatccattagtcggaatgcagggagcatctttcatatttgggagacaaaagggtgcaaatgtagagatgatgaaagagctagatgagaatttacaacattatgcgaatatgcttaaacgatatgtatcttttgatgtatctgaaatacctggtgcaggggcagcgggaggaatgggagcggctgttatttcagtgttaaagggagacttgcggaggggcattgaaattgtattagattatacaaatttcgataaacatatagaagatgcaaatctcattataactggtgaaggtagaatagataaacaaactgcatatggaaaggctcctgtgggtgttgcggggcgtgcaaaacgtttttctgtgcctgtaattgctattggagggtctgtatcatctgattattcagctgtgtacgagaaaggaatagatgcggtatttagtattacaacgagaccgatgacactagaagaagcatataaagtagcagaagaaaatattgaaatgacaacaaaaaatattgcaatagtatggaaaatagcatcagaaaaacacttctaaatgtaggagtgttttattattattatttaataatagtgattgcgattgtttcattaagttaactttatacatagaatagtcttgaaatttggttttcagtatgaatataagtgaataaattgtatatccatacagaaaaatgtcgagttgagtcagactatataaaagatttaaaatatttagtgaaggcataaaagggggatactatctatgaaaaaggaaatctcagttattggagttccaatggatttaggacagatgcgtcgtggagttgatatgggaccgagcgcgatccgttatgcaggggtaattgaaagaattgaagaaattggatatgacgttaaagatatgggagatatatgtatagagagagaaaaagagatagatgaaaatacaaaattaagaaaccttacacaagttgcaactgtatgtaatgaattagcaagtaaggtggatcatattatagaagaaggtcgttttccacttgtattaggtggtgaccatagtattgctatcggtacattagctggtgtagcaaaacattataaaaacttaggcgttatttggtatgatgcacacggtgatttaaatacagaggaaacttcaccatctggaaatattcatggtatgtcacttgcagcaagtttaggttatggacattcttcacttgtagatttatacggagcatatccaaaggtgaaaaaagagaatgtcgtaattatcggtgcgcgtgcattggatgaaggagaaaaagatttcattcgcaatgaaggtattaaagtgttctcaatgcatgaaattgatcgtatggggatgacggctgttatggaagaaacaatcgcatatttatctcatactgatggtgtacacttatcattagatttagacggtcttgatcctcatgatgcaccaggtgttggaacgcctgtaattggcggtctatcttatcgtgaaagtcatttggcgatggaaatgttagcagaagctgatattatcacatctgctgaatttgttgaggtaaatacgattttagatgagagaaatagaacggcaacaacagcagttgctttaatgggttctttattcggtgaaaaactaaaataaatgtaagaaaagcaactgagaagttgctttttttatttgaaaataggcgtataataatgatttatattatactgtacaataaaaatgtttgacatcttaccaatttgagctaaagggggttgtttgtaattgtcgtttgtttcatgtatggtataattaactagttgttggaaatacatacagatagagcataaaacaatatttcaatatatggatagaattgctcgtaagtaggaggaagggatagcatgccttttgaagatacgaccattttgaaatatcttagtacggcattagatattgccattgtatggtttattatatataagctaattcttataatccgagggacaaaagctgttcaacttttaaaagggattacagttattatcgtcgttaagatgatcagtattttccttgaattgcgtacgctatcttggctaactgaacaagtattaacgtggggatttttagccgttattattatctttcagccagaattgcgaagagcacttgagcagctagggcgcggaagtttattttcgcgtgttggaacgcatgaggatgatgaacctgaaatggttgcaacagcgatagcaaaagcaaccgaatatatggggaaacgtagaattggtgcattaattactttgtcaaaagagaccggtatgggtgattatgtggaaacgggtattccgctgaatgcaaacgtatcatcggaattacttattaatatttttattccaaatacacctcttcatgatggagcggtaattatgcaaggaagtacaattaaagcagcagcatgctatcttccattatcagaaagtccgtttatttctaaagaattaggaactagacatcgtgctgcaatgggagttagtgaagttactgatagtattacagtagttgtgtctgaagaaactggtcaaatttctttaacgaaaaatggtaagttgcatcgtgatttgaagacagaacagctgaaggatatgttattagctgaatttagtggaaacgaaaaaacgacttcttcgtctttatggaattggaggagaaagcgtcatggataagttaatggagaatcattggtttttaaaagggatctcattactattggcgtgtatgctttttatgtcagcgacgttaactgaaaaaaatacgacatcagttatattaccttttgcaaatgatacgaaagaaacattaactaattatgctattaatcttaagtatgatgaggagaaatatattgtaagtggtattccggcagagggcgttaaagtaaaattagaaggcccaaaagcatcagttgctacagcaaaagcaaaaaaacaatttgacataccagttgatttgcgagatagtccaaaaggaacttatgagatttctttaaaaacgaacgggcttccagatgatgtgaaaggaacagttcagccatcaacaattaaagttactcttcatgaaaaggcgagaaaatatgttcatgtagatctgaaattatcaaatgaggatcagatgccagcgggggctactctagaaaaatcaagccttaaaccggatactgttgaggtagttgggacgaaagaagaaattgaaagcatttcatctgccaaagcgtatgttgatttaaaaggtgttaataaaactgttacaaaaacgcccgaagttacattatacaataaagaaggaaaacgtttaaatgtaagaacaagtccatctaagattagtgtaacgttgaatgtggcaacgcaaaatacagccaataatactgaaaaaactgttcctgtaacgtatacgaagaaggggagtttagcagaaggattggcggttacaaatatcagtgttgaaccgagagaagtaacgatagctggtccaaaagatattttggataatatacaatcgctagagggggtcgaagtagatcttagtcaattgacagagtctacaacattcgatgcctctgttttattacccaagggtgtaacaagtgccaaaccgaatcaagtgaaggtttcggtgggagtgcaaaaaacaaaacaaacgaaaacaaaaacgattgatggtatcccaatccagaaaaatggactttctaaagatgttactgctcagctactttcgccgcaagatggaaagataagtgttgatatttcaggagaagcaagtatagtagataaaataacagctgctcaaataacagcggtaattaatctgcaaaatgtatctccaggaacgaaagatatttcaattcaagtgagtggtcctggtaatatttcaatagagccaaaacaaaaaagtgctaaagttactattgtgaagaaagaaaaaccagataaagaagtacagggtaacggtcaacaaccggattcaaacaccgatcaagaaaatcaaaatgagaaaccaaaaaatcctgaacctgattcagaaaaagaacaggaaaagaatcaaaaccaaaatcaaaatcaagataaagataaagaaacgagtcaagaaccaacagtagataatcacaatcaaaaagagcaagaaaaaggagcgaatcataatgggtaaatattttggtacagatggagtacgcggagttgcaaataaggagttaacacctgaattagctttcaaaattggacgttttggtggttatgtattaacaaaagatacagatcgtccaaaagtaattattggtcgtgatacacgtgtatctggccatatgttagaaggagctttagtagcagggctattatcaactggagcagaagtaatgcgccttggcgttatttctacaccgggcgttgcttatttaacaaaagcactagacgcacaagcgggtgttatgatttctgcatctcataatccagtacaagataacggtattaaattctttggttcagacggctttaaattaacagatgagcaagaagctgagattgaagctttattagacaaagaagttgatgaactaccacgtccgacaggtactaatcttggacaagtgagtgattactttgaaggtggacaaaaatatttacagtacattaaacaaactgttgaagaagatttctctggcctacatatcgctttagattgtgcacatggtgcaacttcttctcttgctccatacttatttgcagacctagaagctgatatttcaacgatgggaacttctccaaatggtatgaatattaatgagggtgtaggatctacacatccagaaggcttagctgaattggtaaaagaaaaaggtgcggatatcggacttgcttttgatggcgatggcgaccgtttaattgctgtagacgaaaaaggaaacatcgttgacggtgatcaaattatgttcatttgtgcgaagtacatgaaagaaactggtcaattaaaacataatacagttgtttcaactgttatgagtaacttaggtttctacaaagcacttgaagcaaataatattacaagtgataaaacagcagttggtgaccgctacgtaatggaagaaatgaagcgcggaggttacaacctaggtggagaacaatcaggccatattatcttacttgattacattacaactggtgatggaatgttaagtgcacttcaacttgtaaacatcatgaaaatgacgaaaaagccattatctgaacttgcaggggaaatgacgaaattcccacaattgctagtaaacgttcgtgtaacagataaaaaattagcattagaaaatgaaaaaattaaagaaattattcgtgttgtagaggaagaaatgaacggtgatggccgtattcttgttcgcccatctggaacagagccacttattcgtgtaatggcagaagcaccaacacaagaagtttgtgatgcatatgtacatcgcattgtagaagttgtgaaagccgaagttggcgctgaataattagctgaatttatatgaaaaaggagcacaaaaagtgctcctttttcatatgttttatagacgatgaaaaaaatttcattgacggtttatccatgtttgttataagatggtcttgttctttttctcaaaggaaatattgtaaatcataaaagcgccagaactacaaatagtgtagttgacgaggtggggtttatcgagatttcggcggatgactcccggttgttcatcacaaccgcaagcttttacttaaatcattaaggtgacttagtggacaaaggtgaaagtgtgatgagagaagaggaacggatgaaaactagctgtataagtatatacggacttaaacccaatcgagaggaaggtgaaagccgttacaagcttacagggctagcaatatgtaatccgttttttagtataaataaaaatggtatcggactatgtcgttacatgttcgcagagcagtgtaagcatttgtaacggcgactaaacatgtgtggaatcgtaggatttattggagagcaagatgcaaaggaaattttattaaaaggtttagaaaagctagaatatcgtggatatgattcagcaggtattgcagtacaagcagagaacggtgttgttgtatacaaagaaaaaggccgtatcgcaaaacttcgtgaaatcgtagatgagaacgtagcagcaagcgtaggtatcggacacacacgctgggctacacacggtgttccaagtaaagtaaacgcgcatccgcatcaaagtacatcaaaacgctttacattagttcataacggtgtaattgaaaactatgaattagtgaaaaaggaatatttacaagatgtaacgttcgtaagtgaaacagatacagaggttatcgtacagcttatggaacaacaagtgagcacaggattaagtgtagaagaagcgttccgtaatacgctatctcttttacatggctcttatgcaatcggattacttgatgctgaaaatccaaacatgatttatgttgctaaaaacaaaagcccgctattagtaggtgttggtgacaactttaatgttgtggcaagcgacgctatggcgatgttacaagttacagatcaattcattgagttaatggataaagaaatcgtaatcgtaacgaaagaaagtattacaattaaaaacttacaaggtgaaacgattgaacgtgcaccgtttacagcggaattagacgcaagtgatattgaaaagggaacatatcctcatttcatgcttaaagaaatcgatgagcaaccacttgtaatccgtaatataattcaaaagtatcaagatgaaaatggcgaaattgaattaaatcaagacatccgcaatgcgattttagatagcgatcgcatttacatcattgcatgtggaacgagttatcatgcaggtcttgttggaaaacaatttatcgagaagtttgcaaaaatgccagttgaagtacacgtggcaagtgaattctcttacaacatgccattattaacagaaagaccattcttcatttacatttcacaaagtggtgaaacagctgatagccgtgcagtacttgtacaaacaaatgaaatggggcataaagcattaacaattacaaacgtgcctggttctacgctttctcgtgaagctgattatacacttccgttatacgctggaccagaaattgcagttgcatcaacgaaagcttacacagcacagcttgcagtactttcaattttagcggctgatattgctaaagcaaaaggtgaagttcttgatttcgatttaacacacgaactaggacttgtagcaaatgcaatgatagaactttgtgatcaaaaagaagaaatggacgcattagcaaaacaatttttagcaacaacgcgtaactgtttcttcatcggccgtagcgtagacttctacgtaggattagaaggtgcgttaaaactaaaagaaatctcttacatccaagcagaaggattcgctggaggagagttaaaacacggtacaatcgctttaattgaaaatggtacaccagttatcgcacttgctacacaagagcacgtaaaccttggaattcgtggtaacgtgaaagaagtagtagcacgcggggctaacccatgtatcatctcaatgaaaggcttagaaatggaaggtgacagcttcgtattaccagctgtacacgaagcgctagcaccgctagtagcagttattccattacaacttatctcatactacgcagcacttcaccgcgagtgtgacgttgataagccacgtaacttagctaagtctgttactgttgagtaggagattggtaggttaataaatatagttatagctttaaaataaatttacaaatttgcacccctttagatattttatctaaaggggtatttttgtgtcgaaaaagaacatctaaaattgataagcggaaagagccctatagattaaagttttactttatcggattcacttttatttatctgaattttccgttactattttaagtatccgtgaacaatttcctttattacgacaagaagagacggtagattcatggacattacaagggggcttattatatgaaagtgaaagcaaaaacatatttaagtatagaagagattatttcattaccaaccgtatcaagtacaaacataagtgatgatggtaaaaacgtagcatttgttaagaagacggctgattggaaagacaatacatataggaatcatgtatggatatatgaaaaagataagaagcagagttacccattatcaaatggtgatatagatagtacacacccattatggtctccagatgctaggtgtatcgcatatcttagtccagttggtgacggggaaaatcagatatttgttaagtcactagatgattatagagaggttcaaattactgatgagaaagaaggagtcagtacattcaaatggggtcctactggcaaggggctttattatgttacgcagtcaaaagaatgtgaagagataaagaaacgtaaggagctatatggagattttcaacatataggtaaggaacaccagaatgattgtttatattacattgaaatagaaaaggtgatacaaagtgatacagatgaacacgagaacagagttgtttatcaattaacggatggtaaggactttcatatccatgaatttgatatttcaaatgatggtaaaaaggttgtatttataacgacaccaagctcaaatatggcagattatataaatggagatctatacatactccatattaaagctggagagctacaaaagctgaatgtggataagttgttgggagggagtgtttgcttttctcctgacggcagtaaaatatgttacacagcaagcataagagagaaggattactatagaaaccatatacaagatagtacgttagagatatatgatatgaatactggagaggtaattcagcctctaacaaactttgatagtacagttatgccattacagtggacagctaaaggaattttaattagatggcaggataaaacgaattatcgtattggattactagctgaagatggcactgtggaagcattaagcgacaagatagatggctttataatggatgcctctataacaaaggatggaaatcatataacctataataaggctataacaaatgaaacctttgaaatctatttagacgataaaaaaataacggatgaaaatagctttttcaaagggaaacttaaaagtaacagggaaatcatctcatggaaaagtagtgatggtcttgaaatagaaggtgttttatcaacgccagtagagtttgacactaataaaaaatatcctttattagtagtaattcacggtggtccggcttgggcatcttttccgatattttcagactgcttcaatgagaaatatccgattgaacagtttgttgaaaaaggctttatcgttttagagccaaattacagaggaagttcaggttatggtaatgaatttttaaaagctaactatagaaaacaggggattgctgactacgacgatgttatatcaggagttgataaactagttgatcaagggatagtagataaagatagagtaggagttatgggatggagcaacggtggatatttatcagctttttgttctacatttagtagcaggtttaaagctatttcagttggcggtggaataactaactggagtacccattatgtaaatacagatataccttactttattagaatgtatttaggaaatactccatggaatgatccagatatatatacgaagacatcacctatgacgtatattaaatcagcttgtacgcctaccttaattcaacatggggaaaaggatgcaagaattccgattacaaatgcatatgatctatatcaaggattaatggatatggaagttgatacagaattaattatatttaaaggaatggcatatagttctgaccaaccaggagttcatgtggctattatgaagcagaacttgatgtggttttcacactatatgcttgaagagagtatggagggttttaggactttgtaatagatgtttgtacaagacatatgattgaaacggtcttcatattgagatgatttattataaaatatatacttaaactactatcagtacatacatcagggaggactaatatgacaggaaataaaaatgacttactagtagaaaaacgtgaagagttattgaaagtattgcaagctcgttttgagaaaaacatgaaccgccatgaaggtcttgaatgggctaaagttgaagcaaagctgactactaataatgaaaaattgtggtcacttaacgaaatggaagtaactggtggtgagccggatgttattggttatgatgaagaaaaggacgaatatactttctatgattgttcaaaggagagtcctaaaggccgcagaagtctttgttatgatcttgaagcgttagaatcaagaaaaaagcataaaccagaaaataacgctattgatgtggcggccgctatgggtattgagttattaacggaagaacaatatcgagagttacaacaacttggagattttgatatgaaatcatcgagttgggtacaaacaccttcagatattagagagcttggtggtgctctattttgcgattatcgctttggacatgttttcgtgtaccacaatggagcagactcttactatgctgccagaggctttcgtggttcattaaaagtttaaattaggataaataagaaaaagagcctatattcaggctctttttcttatttatattttaaaagtaaattgttactacgcagttttacttaatttatatgttctgtggttgtttttacggaaaagtttagggaaaacatagccatctaatccaatacgtccagcgttctgccctgcaactaaaatgaacatagtcaaaataagcaggtttgggtttacactaacagttccgcttaataaaaatgaaagattcattatgattccgaaaaatgcagctgtttttgttaatccgcctaaaatcaaacctagacctactaaaatttctccccattgaactaaaaagctaaataggtctgcgtttggaaggacaaaatgttgaaggaaatctgcccaccaactttgtactgcagggtggtcccctgatgcttgagcaatagcaccctttagaaagccacttgcgtcaaaagattgtccgaagactttgcctatcccagcagcgaaccatgtatatcctatgtaaagtcgtaaaagtaataatatgaaagtagcacgtttatcagttcttaaaaaattgataaccattgaaatccctccaatattgtatttacacgtttattatatatccaatgtgaaaagattcacaatggagagaatgtgaacaaggataggttgtgaataattgttttattttttgtaacattttatctgctttgataaactaagaatagagatatatgtaaaggagacaaagactcaatatgtggatgaacttgtaatgattagaaactactagatagataaattttgctctcataagcgagggtttatttagttatctgtaaatcattcaaggaatgcatatttggcttgtacatcccttttataaggataggtgcctattttatgtatctgtcttttttgtgggaaagtttatatctcttatataaaatatgcgtcctttaaacttggaggagtatatgatgaaccaattaaaaaataaagtagcagttattacaggggtaagtcgtctagatggtataggggcagcgatttgtaaagaattagctgaatcaggatacgatatattttttacgtattggacagcttacgataaagagatgccttggggcgttgataaaaatgaacaaatacaattaaaagaagagttactaaaaaacggtgttaaagtatcaagtatggagttagatttaactcagaatgatgcaccaaaagagcttataaataaagttactgaacaattagggtaccctcatatattaattaataatgcagcatattctacgaataataatttctctacgttgactgctgaagaattagataagcattatatggtaaatgttcgtgcgactacattgctcagtagtcaattttcccggggatttgataagaaatctggtggtagaattgttaatattacttcggggcaatttcaaggtcctatggcaggagaactagcttatgcgacaacgaagggagctattgatgctcttactagtacgttgtcagcagaggtagctcatttaggaataacagtgaatgcaattaatccaggaccaaccgatacaggatggatgactgaagagataaaacaagggttaaagccgatgtttccttttggcagaattggtgagccaagggatgcagctagactcattaaatttttagtaagtgaagaggccgagtggattactgggcaagttattcattcagaaggtggatttaaaagataaaaaagaaggcatctcaccagggtgagatgccttcttttttaatctttcttcaatcttcgtgcaacaccattccctaaagattgtaatccttgaacgaggataattaaaataaagacggttgcatacattacttcaggctcgtagcgtaaatgtccgaagcggtatgctaaatcccctagcccgccagcacctacaaggccagccattgctgttgcgccgattaagccgatcgttgcgattgttaatccgagtacaagggagggacgtgcttctttcaccataacgtgccaaatgatttttatagtagaaacgcccatcgcttggtaggcttcaatgacaccgcgatcgacttctagtaaagctgtctccattaaacgtgcgatataaggggctgtgaagacgacaagcggtacgataacaccttgcacgccaatggacgttcccattagaaactttgtaaaaggtaaaataaagaataatagaatgataaatggaagagagcgaatgatattaataattgtattaagaataggatagatgattttattttcacgctgcccaccaggtctcgttaaaacaagtgtgacgccaagtggtaatgcaataaggatcgagatgagtaatgagatagatgtcatttgaaaggtttggattgtggcttcccatatgactttaccccattcatccaaaaaggacttgtttcccataatctgttctacctccttctacgatgattccttgctcttgtaaaaatgataaagcacggtggatttcattttgttccccttgcatatgaacgactagtttcccatatgcttcatgttttaactgcgtaatattaccggataaaatattcggatacacttggaaacgttttgtggcaacggctaaggcaggttcccctgaagtagtgccaataaatgaaagtgttacaatttctccagtactttgtagttctttctgtacctcttttggaattttcgctgcaaatgcgctatttacaaatttcttcgtggttacatgttgtgggtttgtgaaaatatcttttacagtcccactttcgactacagatccatgttccataatagtaacgcggtcacatatacgctggatgacattcatttcatgtgtaatgagtaaaatcgtaattccgatttcttcgttaatctttaataacaaatcaaggatagaatcggttgtttcgggatctaatgcgctcgttgcttcatcacttaataacacttcaggttcatgtgatagcgcacgagcaattgcaacacgctgtttttgaccaccagaaagttcgcttggatacgcatcttttcgattaaaaagatcgacaatgcgtaaatacttttctactcttttttcaatttctgcttttggaatgccagcaagccgtaacggtaatgcgatattttcataaacggtaacagttttaagtaaattgaatccttggaagatcattccgattttttgtctcgcttttgctagttcttttgtcgataacgttgttaagtcttgttcgtttacaatgatatttcctgtcgttggtttttctaataaatttacacatcgaatcaatgtacttttaccagcgccactatacccaatgattccaaatatctcgcctttttctactttaagggaagtagacttaagagcctcaacattccctttttttgttgtaaatactttggatatgttttttaattcaatcattatcgtcagctcctaccaagatggtaaaactgaaccatcaaattttttctcgataaactcttttacttccttagactgataagctttctttaatttatttacaacggcatcatctttattttcagtacgaacaacgacccagttcacatatggtgaatcttttccttcgcggaagatagaatctttcgctggacttaattttgcacctaatgcaaagtttgtgttaattgcagctgctttcacttcacttagttgcgttggtaattgagatgcctctaattcgacaatctttaatttttttggattttcaattacatcttttgcagtcgctttttctgtagcctttggatcaacttttaaaacccctgctttttcaaataattttaaagctcgaagttcatttgttgggtcatttggtacagcaattgcatcgccctcttttaagtcttttacatcttttatatctttagaatatacgcccatagggaatgttactgttgaaaatacttcagctaatttcatattgcgttcagctttaaatacatctaaatacgatttcgtttggtaactatttacatcaaggcttttttcatctaatgatacgtttggcgctacataatcattaaatacttttatatcaatttcgagaccatcttttgctgcaacttcttttaccttttcaaaaatttgttcatgtggtccacctgttacaccgacagtaatctttttctcgtctaatgcttttacctctttatctgaactcacgctacatgcgcctaataataatactgctccgcttacaatgcttaataatacctttttcatctataaatcccccttcatatacgttccaaaataaaaagcacctcccaaaaataagagaggtgccgaatagacgaaatagattcctctcttatcttccaaaacgaaaactcgttttgcaggaattagcaccttagcttatacgtcataagctcggttgccgggcatcatcgggccagtccctccgccactcttgataagagtatgtgtatgtagttttgaatatggtactaatagtaaatcgtacaaaaagaattgtcaatgatattttcggaatatattttattttaagataatcgaaacattcccctttttatgtcctttttctacatatatatgagcttcagcaatttcttctaatcggtaagttctatcaataacaggttttagcttttctgtttcagctagttgttttagcaggttcatatcttctttactgacctttgccatcattccgttcacagatacatattttccattaggcattaatgcatctgtacaaagagactttttatattttccaactgcatcaaatataatatcgtagtgctcgccccgcttagtaaaatcttctttcatataatcaattacgttgtctgcccctaaagttgttactaaatcgaaattcgaactactacaaatggctgtgacagtcgccccgaagtatttagcaagttgtatggcagctgtccctactgacccagaggcgccgtatataagtactcgttgccctttttttatctgtccttttctaaggaagtgcaatgctgaagttccgccaaaaggaataacggcagcttcttcatatgtcacattggtaggttttaatgctattaatccactttcatgcacgcatgtgtattccgcataaccaccaaggtttagttctgttaatgcaaaaacttgatctccttttttaaattgtgttacatctgttccaatgtcttcgatttcaccggataactctacgccaagtataggttttctcggttttctgaaacctaatatgatccgcataggaatccaaaataagagggggctattaaagccacgtattctacaatctccagtcgatacacttgttgcgtgaattttaactaacacttcattttttttaggtttaggcttttctacattttgaagctggagaacattaggtggtccgtactttgtacaaataatcgctttcataatgacctcctgaaatgagttgttattatttacatcatatttaaactttttctcaaacatgttgttatataggaaataaatttaaagataaatattacgaattatatagatttcataggaaaagagatgatattatttttgggaaggaggggacgttatgaaaaaacttattttaatttcaagtttagtacttgcagtcggtctaggagtagggtgtagtaatgagaaaacaaaaaagactgacgaaccgaaaaaagaagctgtgcagaaagaaaaggaattaacagcgaaggatgtttttaataaagcgaatgaagcttttaaaaacgaagaaaatgtaacgatgacatatgatgtgggaataaaggctgaaggaacagagatgaatgtaataaaggctaaaatgcaactagagccgaagaaaaaaaattctcgttctgaaatgaatgtttctggtacagaggttgttgtttatgatgtgggtggcaaaattgctggtcagttgaaaaatcctaatacgggtgaaattatgtctgtaccagaggaacaattgaatgctaacggaatgaacgcgactcaaggaatggtagataatttagagattccatcggaaattttaaataaagtgaagatggagaaaagtggagataattataagctgaagtttgcattaaaagggcaagagacagagagtatgctagctagtatggatgaaaagcagaaaaaaatgctacaaggccaaaatgcaaagatagaagaaatagatggggaatatattattacaaaagattttaaatatgaatcagcaaagatagatatggttatgagtagcaatggtgaggataaagcgcacattattacggatgcaaagtttacatcgtatgataaatttgatccaatacaattgccagcagcaaagtaatcactgtcaagagaggtacctgaaagaaagggtatctctttttgttgctaataaggagagtgtcctttgaaaaaaagaaagatagcagtggtcattgtcgcatatacggttttgcttgcaacgtctgtacatacgtataaaaaacaaattgatcatcctattatgagtgatgtaggtaaattgcttccgacaaaaataaaacgtgttgaaagtgctacggaagagcactcgttaataaaattagtgcgagatgcaaaagtttcaggagagaaaatttccatcgcaggcatgcaacatagccaaggaggacagacatattatccgaatggcacgatgctcgatatgaaaggatataataaaatattagaatttgatccagagaagaagcggattacagttcaaagtggtgtcacctggaatgatattcagaagaaaataaatccttatggccttgcggtacaggtcatgcagtctcaaaatatttttactgttggcggttcattaagtgtaaatgtacacgggcgtgatattcgtcatgaggcactgattgatacagtagattcatttagattgttaatggcagatggcacggtacgtaatgtaagtagagaagaaaatgcagagttatttccatatgtcattgggggttacggtttatttggagttattttagatgtgacgctgaagttaacagatgatgaattatatgaaatgcacacgagaatgatagattataaagaatacgcatcttatttcaaagagaaagtgaaaagagatgagaatgttcgtatgcacttagcgcgtatttctgttgctccaaattcatttttaaaagagatgtatgtgacagattatactttggcacaaaatcaaaatatgagagaagagtacagtgaattaaaggaagaaaatattatagctgcaccgaaatttttgcttgggttatcacgttatagtgattggggaaagaatacattttgggatatacaaagaggttattttgaacgtacagatggaaagtatgagacgcgtaataatgttatgagatcagatagtgcttttatggaatatgaaaatccaaataggaccgaagtgttacaagaatactttgtacctatagatgctttcacagagtatatagatgatttacgtaacgtattaaatgaagatgagtttaatttactcaacattacgattcgttacgtggaaaagaatgaaaatgcagttttgtcctatgcgaaagatgatatgtttgcgctggttcttttgattaaccagggacgctcagagagtgagataaagaaaacagaggatgtcattcgaaagatgattgatgttactttaaagcataatggtagttactatttgccgtattattcttatccaacgaaagagcagttaaagagggcatatcctcgcattgaagaatttctcaagaaaaagaaggaaatagattcagaagagagatttgtgaatttattttatagggagtatacgaaatgacatatagaagatttgtggcttcgcaaagtatcatcatgatggcaggaagtatggtatttcctttttatatattattgcttcgaaacgttggaaatagcttctcgcaatttggctgggcgtatggcttatttgctttaacatcagcacttgtatatccactagtgggaaaggtatctgatcaagtaggggataaaaaattattaatcatatacgcttggtccatggcaatcttaatgctttgctttccaattgccacggaagtttggcatgtgtatattcttcaaattgtaatgggcgttttaggtgctgtgcagcgtaatactgagaagacttcgttagcacgaaaggttgcgcaggaaaaggctggttatgagattggaaaataccatgtgtggacatccattggcggagcagtagcggttattgccacgggatatttagtagatttctttacgattggtacaattttttatattgcatctattctatatgtagtgagcgggattgtattaagtagtaaaaaaatataactattcctattttcaccttaataacctttatttgttatactaaaagggaatacaaaagaaaaggggacagtgcctttgatgaaatttgtagttttagctattcttactttgtttttgattccatggacaagaagtagtagtaagcttcgagcagtggataagaagggagataagaaggttgtaaagggtaagaaatcatctattttagttattcctgttttattttggataggtattgcaatctatgaatacttttggctaattgatgatcgagtagattcgattcttactcattattctgttgcagtagcaattttaattgggcttgttttattttcacaagatcaaatagggaaattagaaggtacattaaaaggacttctaatgtttattttactcgcaagttacggctactttggttatttgcacgatatagtaatctcgcaaaagaaatatgattctgttgttaaggtagagaaagatatttcagagccatttactgaaaatgaccagccgtttacagtgccgccaaagacagcggagaataagatgaaaaaagtatttggtgatattccaaaagtagcttattttgagctaggagaattaacgccacaaatggtaaacggcgaggctttatatgtagcgccgattgaagtttcaggattttttaaagcgcgtaaagctgagacaattccagggtacgtaacgatgtcaggtacgaatcctgatgcggaagcgaaactgcacctcggttataaaatgaaatatgtgccaagcatgttttttggtaataatttagagcgtgtggtaaggcaagcagaaccaaatttaatctttaaaggaaaacctaaatttgaggttgatgataaaggaaaaccatattatacaatgacgtatggtgaatttatttcaggaagatctggatttgaggtagaaggtgttgtcgtagtagatgcacaaacaggtgaagtgaaaagatatgataaaggaaaggcacctaaatttgttgatggtgtattaaatcatgagactgcatctacgttaaatacgtactttggcaaatatattcacggattttggaatacgaaattctcgcaaacagatatgaaaattccgactgagtggggaacgaaagaaggcgtgaccccgatctttggtaaagatggaacactgtattattttacagactttacttctccaaaagaaggagtagattcagctctaggctattcattagtagatgcacgcacaggcaagctatattactataatggaaaagaagtaaaggggattatggatggttcagcagctacagaagtagtagataattcctttaagagagagaaatggcatgggacaatgcctgtcatttataacgtatacggtaaaccagcttggattattccggttgttgatgacggaggcctagtacgtgcgcatacagttgtatatgctgctaatgcaaaaatatttgcgacaggttcttcgcagaaagaagcgcttgagaattataaaaacgtaatgagcggtaatggtgatacatttagaccaacctcaacaggaaaagaagcgcaaaaagaaggtattgtacaacgtgtatataaagaaaaatcaggtgaaaatacaatcgtgtacgtacttttagaaaatgaacaaaaggtatttatgataccggtgaagaaattcccatatgctatgtttacagaagtaggagatccaattcaaattacatatttagatacgggagagacgatggcctcggtatctaaatttacgaatagcaatgtgaaaaaataaagcggtagaatttctatcgctttttttacattatgaaagaggaaaatgcactgtacttgacgtatgtttatgatgtaactataattgttacgattcagtgtgtataggaaagggtgaattgaaaaagtgaatgaagttaatcacgaaatatataaacctgtaaaggcaaacaggttgtggatgattcttgtattagggacacttacggcgattgggccattatctattgatatgtatttgccttcattaccgaagttaacggatgacttgcaaacaggtgcatccctagcgcagcttacattaacagcttgtttgcttgggttgtcagtagggcaattatttgttggctcaattagtgatatttacggaagacgcaaaccacttattattgctcttattatttatgttgcttcttctttactttgtgctgttgcgccatctatttggacattagtattattgcgcttcctacaaggagcttcaggatcagccgggattgttatatcacgtgcgatggtaagagatatgtactcaggttctgaaatgacgaagtttttctcactgcttatgttagtaaacggagcagcacctattttggcaccgattattggggggcaattgttacagtttacaacgtggcgcggtgttttcatcgttcttggagcaattagcgtattcatgttaatctcagctacttttgtattacgtgaaacattacctcctgaagaaagagaaacaggtggtttgtcagggactttggcgacgtacggaaaattgttaaaggaccgtctatttatgggatatgcattgtcacaaggattagtaacagcggcaatgtttgcatacatttcgggctcaccatttgtgttgcagaacatatacggagcatcaccacagcaatttagtttattctttgcgattaatggcctcggtattattattgctagtcaggtaacgggtcgtttagcggggaaagtgaatgagaagacattatttgttgcgggtattattatcgcagctgttggtggcctatctttactactgacaatcgtactaggaataggtttaattggtgttttatgttcgttattccttgtcgtatcaagtgtcggggttgtatcaacaactgggttctcattagcgatgagaaatcagaaacaagctgcaggaacagcatcagctttattaggtttattacagtttatttcaggagctcttgttgctccgctagtaggtatcggtggaagtaatacagcattaccgatgggtattgttattgcgctttgtgaagtaggagcagtgttatgttatctatttatggccagaagaagtgagaaacagtttgaactgcagcaaaaacaaaatctagaggcttaacaaaaaagaactgattcaaagggaatgtttgaatcagttcttttttcatttctttgaaatacctcatacagttttgtaaggtgatgtagtaaagcattgcaaaagttatttgtataaagtgacgatactgtgacaaacatgttggtatatatatattacggtgtcgtcttaagtgtaaaaagtaggatgttctcggtataataacaagtggagataaaagaaactataatgagtaatagttgtagataaaaggagaagaagagatgaagaaggttttgggtattgccgtaatgggaggaatgctccttctagcagggtgtaatggaaataaagatacgaaagaaccgaaagaaaaggtagagcaatctacagaacaaacagaagagatgaaagaataccgtgcagtacatgaaaaatacgatatgaaaatgaataaagaaattaataaagcactgcagttatttgaagtagcaaaagaaaagggcggtaaggaaataacgactgctacatataaagaagatgtgcaaaaggtaacaacgagcatgttagaagatattgatcatatacgtaaagaaattcgtgttccgaagtcgaaagagcaagaacatgaagtatatgttggtttcttgaatgaatcggaacaagcgatgaaaaaattacagaagttagctaaagaagaagattcatcgttgattcgtgatatagaaattaattttgcaacagcatcgacatactataaacgttttcaagcagaaacgaaaaaataaccttgcctgtgcaaggttattttttcttcttactaccgcctacttctttattttatttctcttttgtattcttttttcgttccatcagagaagacaacttctaaatcaaatttttgatagtctttatcaagtttgaacacgttcactacttgatcgattacttcttggtcagcagtatttttatcaaattttaattcttgtaagagtgggcttaattttgtgatagcctcgtctcctgttaattttacatctgctttatgatcttcaatttttgcttccattttcttatcagctgctacatttttatagtctgcttcgtagtctttctttgtatcttggtagtctgcctttaaatcgaattcattgaagtttagttttaaatctgcaggagcctcattttttgcttcttcagtcgtctttttattagaagttgtgtcttcttttgcaggagctttacatcctgttaatgcaggtactagcataagagctaataaaactgatagtagaattctcattataaattcctccttatgtaaattcgttctatacaagtttttcccaaaaacatgtaattatgtatgtgttgaaaataaattattattctgtagttgcaagggctaatccgcaatttaaatcaaaaaagatttgtatgtatatggtaaattgaagttgtgaggaggggctaaaatgcatgaagaatataaagagataataaaaaaatcaattgaatatatagagaatcacttacatgaggagcttacaacagaaagagtggcatctcacagtgcagtatcgatgtaccattttcatcgcatctttcaaagatatgttgggatgagtgtaacagattatattcgaaagagaaggttaactcatgctgcgcaagttttagtgtcaacggagagagctgttattgatattgcagtgcaatacggtttttcctcacaagaggcatttacgagagcttttaaaagaatgtttcaattgccaccaaagaaatatcgaaagtactttcagtcattttatatagaaagagagggtgtttcaatgcaaaaaggtataccgaaaggatggatcttaagtggaagtcatcctgctgaatatgagatgggtttagattatgaagttgtccatcaggggaaagtatctgcatacataaaagcaaaagagaatgttacgcacggaggattttcaacattaatgcaaatgttccgagcggataaatatgtaggaaagagattacgttttacagcatttattaagagtgaaaatgtaagagattgggcaggattgtggatgcgagtagatggaaaagatacagaatcgctcgctatggataatatgcaaaatcgccccattaaaaatacgaataactggcaatcgtactcggttgtattagatataaaagaagaagcacttggtattgcatttggtgttttattatcaggagaaggttgtgtgtggctagatagtattcgatttgatgaagtagatgaaaaaattccttcaacagatttggcagagaacttttatgaaacacttttagaagagccggtgaatctacaatttgaagaagtagaaaaataaagaataaggagaaaagatatgctcaaatatgtaaaactaataagtatttgtttagtaatatcgtcttgtattatgggagttaattatttagttaggtatctttggtcagggcatataccttctttgacgtggagaacatatttgatgtttgtgtttatatgtataatgagttttggttcaatgcaaaaagaaggaaaagaggattattgacaatagtcttcttcgcctttctttcattaacacaaatggttgtaactgtttttggagatgcaggtatgattttcaatatcatctcactatcgttacaacttgtaagtttgggtgtaattgtaccacatgaaatgctttctaaaacataccaaacaatcagtgaattatttcctgcaatatatgcaggaaatggctattatacaataatatttggaggagttagtttagaaagaaatattatttcattattagttattgtattggttatacaattagtagcaggtatgattttagctataaaaggaatggcaaagggaagaggaagctctgtagttaaagttgtataaaagtaaaaaggtatccttcgtgggataccttttacttttgttactttgcaacttctgtccacttgtagttaaattcaccaccgaagtcagttgttacaagtcctttaatgaaagagcgttgtaagtaagaacgaccttgttggtataaaggagcgacagcgccgtcttgtaatagaattttttcagcttgcttcattgcttcaaagcgtgctttttcatcgccagctaaatctgttttcactttatgaattagctcatcgtactctttgttagagtatttatcgaagttataagcactatctgttgtaaatagatctaagaatgtaattggatcagcgaagtcagggccccagccgtcaataccaatttcatagtcaccacttaatagtagttttagctgttgtttacgtggttgtggttttaagttcactgttaatccgtctaagttcttttctaattcaccttttaaatattcaccagtctttttagctaaagcattgtcacttgttaatagttcgattgttactttgtcagtaccaagttcttgttttgcttttttccagttttctttcgctgttttcacatcatccttgactagatttccattttctttacggaagtcgttgccttctgggctctttgcgaatttcgcaggaaccattccttcagctggaaccgcgccgttatttaagattgtttctacgtaagcttttttattcattgcgccgttaatagcaaggcgtgcatgttgattttttaatgtttcatttttctgatttagtcgtaagaattgaatgccgacttcagcgcgttctttgaagtttggatcgctcttatatttatcaacaaactctgcagttaaagcaacacgatcaatttgtcctgaatcatataagttcacttctgtagacttatctttaacgacattgaagttgatttcttctagttttacagttttagcatcccaatagttaaggtttttcttcaattggaagctttgttcatgtttccagttctctaatgtgaaagcaccgttgtaaattaaatgagttgtttctaaaccatatttatcgccttgagactttaagtactcttcattaattggtaagaatgttgagaatgtcgttaagcttaagaagtagggaacaggacggtctagttgtacttctaacgttttgtcatcaacagctttgacccctagttgatcaattggcaattgtttttggtttatttgtttcgcattctttatatcgaagaataagaatgcgtattcagctgctgtatcaggatttacggcacgttgccaagcgaaggcaaagtcctttgctgtaacaggagtaccgtttgaccattttgaatcacgcagatggaatgtatattttgttttatcgggactaatgtcaaccgactcagcgacaccaggaaccggtttattatcttctcccattgcatataacccttcaaaaacattgcgcattacgttcatggattccccatccgttgcttttgcaacatccattgttggaatttctgaagcgaatgataagttaattgcctgtttatcaggtgctttatcgtttgctttcgctccgcttgcattatccttatttcccccgcaagcagttagtaatagacttgcccctaaaacagatgcaacaacaggtataacttttttcttcattgttcgttcctccctaaatgtgttgttcgtaacgtcataatgtccatgtcttgaagtagttatagaaggagataaaacctattataaatatttgtttataggtaatcaggtgttctatatgtatatacatgttgatctataatctatcgttatatgtttcaacgtagtagacattatattttgatggtgaaatatttcgtttctttgattatttagaatattaacactggaaagaactatatgtcaataataaaaatagattgttaatttcttagaataatatattgaaaaagcggattctcatgtgtgagagaacctatttttaatatattttgctaaaaaaacaattggtgtgggctaataataagtggggatgaagaaacccccacttattaaagtttcactttatttttcaatttttgcccacttgaagtttaattgccctgcaaagtctacttgcacaattcctttcacataagaacgttctaaataagattcgcctttttggtaaagaggagcgataacagagtctttaaataatattttctcggatgctagtaatgcttcccagcgagctttttcatcaccagctaaagttgttttcacttttgctattgtttcatcgaattccttattagagtaatgatctaagttataagggttattcgttgtaaatagctcaaggaatgtaattggatccgcaaagtcagggctccagccatcaattccgatttcgtagtcaccttttaataaaagcgaaacttgttgcttacgcggttgcggttttatatttactgttaatccatctagattcttttctagttgtccttttaagaattcaccagttttcttatcaaggtcagcatcactcgttaataattctaatgttatcttttcagaaccaagctcttgtttagcttttttccataactcttgtgcagattttgtatcaacttttgttaaatcgccatttgcagtacggaagtcttttccttcaggtccttttgcaaagttttttggaacgagaccaaatgttggtgtagatccatcatttaataacgtatttacaaaggattttctatcaattgtttgatcaattgcttggcgtgcagaaacgttttgaagcactttgttttgttgattcatacgtaaaaattgtacgcctacgtttggacgttctttaaagttagcatcctttttatatttatcgacgaagtcagatgttagttttatacgatctaattgttttgactcgaataaatttacttctgttgatttttcttttacgacgttaaaattgatttcttctagtttgacagtatctttatcccaataggtagggtttttcttgaatttaaagctttgttcgtgcttccaatcgcttagtgtaaaagctccgttgtacaagattgtattatcttctaaagtgtacttatcaccttgtgctttaaagaattcctcgttaattggtagaaatgttgggaacgctgttaagctaataaaatacggaacaggacgctccaattctacctcaaacgtatggtcatcaactgcttttacaccaagttggtcggctggaagttctttgttgttaatttttgttgcgtttttaatatcaaagaatagaaatgcatattcagaggctgttgctggatctacggctctttgccaagcgaacacaaaatctttagctgtaacaggagtgccgtttgaccattttgaatctcgcaattggaatgtgtatttcgttttatcgccacttacttcatgagattttgcaacaccaggaacaggtttgttaccttcaccaagattatacaaaccttcaaatacgtttctcattacttgaccagaatcagtatctgtagcacgagccgtatccattgttcgtatttcagtaggtgaagataagtttaaaacctgtttactaggtgcctcgtcttttgcatttgctccgcttgcttcgtttttataactaccgcaaccagttaataaaatacttactcctacaactgatgcaataccgggtacaaacttctttttcatttgattttcctcctcgtatattaatatttaagtcctatttcagacttagattttttctttaataagagtcctgtaataaataaaagtatctcatataactagatactcacgggtttataggtaaatccctttcctaaaaaacctaactttatcatacgaggaggtggtaaacaaactgtagtcattcaaaccggaatgagttgctcattttatgattggcttcctattataaaaaagctttcacagcactttacagtcgtttcataccatcgcccaggttatgggaaaagtgagctaggaaatcaaccacgtacaataaggcaagttacaaaagagctgcatatgttactaaacaaactagctattcaagagccatttattctaatcggtcattcctatggaggattatgtgcacaacattttgcgatgttacatgaagataagctgcaagcacttattttagttgattctacttcgatgaacttacaccgtttagatgaacttcatttaccaatttctgatcaaactgactcggatgatatgtggcttgaaaaatataatacatactccaaaatagatgtagacacactttataatgaactaaaacctattctcaccgatcaatcaaaacagcaaattggattctctacctcgccttcattatataaagcgacagcttctgaactatcggagtggaaaaactgtgctctctcactaaaagagctatgtaaaacattagaaataccattaatcgttatcggtagagatcctcaatattctattactcaattgactaatggtggcatgccaaaagaggaagcaacacaacttgaagcaatgtggcaagaactgatccatgaacaattacaactctcaatacatagccaatatatacttgccgaacatgctggtcacggaatcgaaattgatcggcctgatattattattggggctgttcaatctctataaataaaaaaaggaagcaactaaagttgcttccttacttatctattcataatcttcttcatcatcgatttcttcgtaataagcattcccattacttacataaatagggccattcgcaacatcaatacgtaatacccatgcccatggcacagctaaacgcttatgtattgctcgccaaaagctcattgattttctttcgtactcctggaactcctgaagtaactctttataggaggaaccgtctaactgaatatttgcttctagcaaacgagaatgggcatagtactgcagctctagttcagcagcaatttccatttcttcttctgttgccataccaataattgttccatctgctggtgcaatttcatatacgttgtgaacttcaataagcccttctttctctttctcaaacatgtaaacagcctcctttaacatatattttttatgttacaaagtcatacttctacaataacttctctctttcctctttttttgataaacttttacaaaatatttaaccgatgacctgttttctctattctttcagcagaaatgaaacgatttttatcaaaatttaatttatacacatcaggcatatgaagtgttttccaaaactccaaatcatatttcgaattaaaataattcattagtaataccataatattcccatgcgtacctattacaatattcttaccttcatatttttttaatatattttgtatacatattacagcgcgcttttgtgctacagtatttgattctccgccttcgtatgcaaaactccaatctttccacacattctgcatagcatcattaaaatttgatactggctctgtgctcaataatctttcacgcaaatcttcttcagtttgtattgataatttatatgtattcgcaattccttttacagtttggattgctcttttgtaaggactagaaataacaacatcaatatgtttatcttttaataaatgcgttacattttctgcatcacagtgccctttttcagataaaggtcgttcccgttcttcttttgtatatgtagaatgggcatggcgaacgaaatatattgttgtcatttttcaacctcctttcttattttccatctatattcaataataagattggaaaatcctgtattacaaaagagcatttttcataagtgcccctttgtttacataataaaattatttcattataatttatttctgaatttctcacttatgacaatatctcgaataaagtaatccatattacttagaagtttttcaaatgctttttcactcaaattgttcatcataaagacaatctcaatcttattcccttttttatcagtaccatagaaactatttgttaatacaaatgccgtagaaccacctttctgtccagcaaattcgaatataccctctcctacggttcctttaaatatattctcaacctcaccttgcatttgtggtgtaaaataatttctgctatttatcttttccaataaactcatgtaatccttagcatttgcacctataaaccgatctgaccaaatacgctgaaaatccatatcggcttttaacgatatctcgcgttttgtccattctttctcgtctttcatccattcatgtatttgccatacatgcttaacatattcatcattagacatattacgtagcttgtccaatgctttattttgaggaatatgcagttctttttcaacatagcccctcatatataatgcccctgtatacgttggataaaattcatcgtgactatttaagcctaactctttcaaactttcatttatccgcgctgctccaagcttgtccaataaatatgatgcattcgcattcgaactataatggatcattcctttcactacttcttctaaagaagtttgaccacccttcactaactctttaccttttacatcatctagccatgcagggtgtgcaccaccatcagtatttttctaattctttcaatgaaattttctcgtcttttcttatttttccttcagctacttgcttagcatattcaattgctataacgattttcgacatacttgctagcggtaatttttctttttcatttattgatgtcaatgtttcaccatttcttttaacaattaaagaagttgttttatcatccttatgttcttttatgtaatttagcacataattagagtcttctttggaattgacatattccttcactgaaaagaaagctatacagcctactatagtaattccagctataattccaacaacttttaatcccctcatgatactccccctaaaataaacatattatatattatactaaataaatttccctttttaagtaataattagattatttatacaaaaacacttcttttcttaaacaacaaaaaaacatgccttcattaggaaagcacgttttgtgatattcttcacattgtttagttaaaaaataaatgtttacttaccatgatgtaacattaaatcactaagttcttcttcaatgtgatttaatttcgcaacgccttctttccatttatgaatataacgtgaaaccccaacgaaaaacaaaacaataattgtggaaagaataataccatatacgattgctacagtactcatagttacacttccttataattagtaatgtggttattagttatatttttattataaacctttttcttttaaaatacttcgatttcaactttttgtaacaaaattgatttttctaacatttcgttcgtgaaaatggcatatttttcacaaattatacaaaacttcaccatatgtactattaccatatgagttatattattaaatagaataaaggggatgatatactatgacgacttggtttattgtaatgttagttgtatttggagcatttaaaattatcgtttctagccttcctaacactgttattgaatccattattagcaagtacgaaacacatccaaaacttgaagaagagaatgtgactattacaattcacggaaataacgtagaaggcgaacagaaatcaaaaattattcatgattttaacgaaggtttatttttagatcgctattatgcaccaccacacaatgagggtacgcctttaattatcaatgcaaaacgtggcaaaaagaattttacattttatatttatagtcacgaggagcatgttgatgttgtaaaacaatataaaaagaaggtagttgcttatagtttacgctctaaaaaccttcaaaatagtgatatgttcgtgtcagctgacttagcttaatactcatatattggaaaaaggaatccacgaaatatggattccttttttctcatttactgaaaaataagctctgtcttcaaactatctttcggtaacaaccagccttttttctctaaactcgccattaataattccctttgctttgtcgcaatactttcttcatttgttttaaatgacacttctattacgaagtcatcttctaattttccggtattacttaatggccaaatttcaatatttgcttttatgttttcaaactctcctgtatatcgtttcattaatacaggaccgtaaatacgggaattctttaacatttcttctccccaatttgtatacaaccatttgttcattttccctggtaatctttctattaacatgttttgagcagcttgttcatttggtaaatcaagtatcccatatcctttagcgctgtaacttttcttatttgaaatgcttaatgttttcttctcaaatccccaatctatttccgcctcataactatccgtattactatcgaatccttcttttttagctacttctagtgcatcttgaattacaccatttggaataggatatctttttttatatgttaattcaaaatctttactaaattctttctttcgaattctagcaaaccaaccttcctcgcttaaacttttattcgcagtatctaaaaattgcacttgtattctttcatattttgtaccagcctggaaatgttctagcacctcttgcttcatctctttgttatcacctaatacttgttctggcttcaataataactttacttcaaaactaggtttcattggactagctgcaaacccttccttaacgttataaaggaaacaacaaaagaaaatgcttacgaatacaaatacttttttcatatacctatcccctttacatttcaaatgacttctatacgttccattgcaagtgaatatacattttcataccctgctgtacttagcttttgttgtaatcgatccgtatcctctttcaaagcgtgcactaacaccgtatgttctggtaataatgtatttagcatctctttaacgtctcttatactttggtgaactttatacggaactctcttcaccctacatgtactccttacatgttctttcataactttttctgcaaaactccctttcgcaatatgcccagtaaaaataacggcattccgtttttcattccgaagttgttcatagtataactgtgctcgtttcgtttgcatattcgcatcactcattacaactattccgtaactattttgcatactaatgtcattatccataactattatgtttctttttaaactctccataatccatttaagttcttcattattttttatccaacctttatatatgaacatctcttcaaatccagccaaaatttctttatctactataagcggaaattctttatatcgttcatataaatacaatactatatcttgcgccctaccaagttgtggcagcggtaataatgctattccttcattttgcataactcgttcaatttctgcacatagatcgtctaatctttcattttgcgaaacatcatctgtgtgataagcggcatctacaattgcaacttttatattgtggcccaatttctcaggtaaattagctcgtagtatgttagactctgctgaatagtcgcctgaataaaatacgtatgtattacacatatcaactaaaaaccaaacagctcctaatacatgcccactatacccccactgaaaccgcaatgtaggagtaatttgtaaccattcatttggattgctaatctcatcaatacatacataatttaaatcttttatatgttggtcgctataaggtaaattccatccttgcattacattatagtttctccatttttcataatataacggcagttgctccttcgtataacgagtcgtccaattttttttcttatagccatacttcgctaataaaggtaaacccatcgtatgatcttcatgaatatgtgataaaaataccgcatctaaaaatggaacagcttctctctctatttttggataaccatcctcataagatcgattaataccacaatcaaatactattttcgtctctttattttttacaaaatagcaagagcgaccgtattctcctgctcctccccatacttccactctcatcatgctaccccttttcgcttttgctccatatgttgcagcagtaataagcacattgttgtaagtccaacagaaacaacggccatcgccattcctatagatacttcaccctgttcaaattgagcaaaaataaacgttgctgacgtttctactgatggaggtaatacgagaagtgatgctactaattctcttattgaaattgtaaatgtcatcgcccatccggcaagaatgcctgggataataagaggcaatattatttttctaaaaatataaatataatttccagaaaaaatacttcctgcctgcacgagagaatcatcaatttgtccgagtgatgattttacatattgcaccgtgtaaggtaaaaacagaacaacatacgttacgataaccatgattggtgtattataaattgacataggcatatatggtgaattccaaaatagaataagacctacaaccataacgattcctggtaccatattcggtaacataccgcacatatcaagccatttttcagaggtttttttcccctttcgaatcataagtgccaaaaagactccaatcattaccgcaataatcgctgttacgagtgaaaaaagaaaactattccataaagcctctaatcccggagaccccattgtaaacaatgcctcataatgacttgttgtaaagttatttacatgtaaaccgccgcctcttaattttgaaaaagaagcaataagtatagaaaagtatggaattccaattgatacgattaataaaccaattacatacatccatgctacaacgcgcgtaaatatagacaaagtatatcttttagatttcacaccttttccactaaccattgcatatgaatactttcgattcaatacattttgcatataccaaatgagcatacaagcactaagtaataaagaagataatgctgttgcactactgaaatcaattggccaactcgaaataaatttatgaatttctgatgttaacacgtggaatcctattctacgtccgaatgtagccggtgttccaaattcagcaatcgtctttacgaaaatgagtaaagcacccattacataacttgatactaataacggcaatattatttttcttaagcgatagaaaaaacttccgccatgaactgctgcagcttcttctttactactcccaatctgaagtaacgtgtttttcagcatgaaataaaggaatgggaataaatgcagactcataattaataccatacctcctaaactaaaaaacgatgatgaaactgtctttagcatcgggaaaaattgttcaaaatagccgttaggttgcatgaacaaaatccagcccatcgatccaatatacggcggtgtcataaatggaatcataaaaacaatatctaacttactatactttcctacatctgttttgctcataataaatgccaatggaaatgcaaatattgtagcacctattacaacgagtgcacctagaagcatcgaatttagaaaaatcccagctaatccaccactctgcatcacttcaaaaggctttaaaaaattccaactgctattttcatatacactagaaaataaaataagaaaaagtggaatgacgattaacatcgccacaagtaataacgctaccgtcattccaacttgtcttactgatacgaatcgatttaccatggaatcaccatcttattgaaatactttcttaaattgttttcctatttcatcttgctctttctcaactgttttccaatcaatatttaatactggaatctcttctacatttggtctattttcagcttttatatctgttctaccaggcaataaatacgctttagaaacttgtttttgtacatcatcggataataaataatcaataaactcttttgcaccttcaacatttttactatccttcataatcccagctacacgtgggctaataactgttccgctttttggatatacaatatcaacaggttcaccctttgcttttgcgctatacgtcatataatcaacacccgcaatgaccatatctttcgcacctgttacaactgggtctaacgcttcctgatttgctcctgctactgtaacttcatttttcttaagctgctcaaataaattccatccatcttgtccattctttttcacgtatcctgttacaaagtctaaagctgaacctgaaagtgctggatctggaagattcactttccctttccattctcctttcgttatatcgctccaatcttcaggcgctgtcttcacattttttgtattgtacacaatccctaatgctgaagcactatacccgaaataatggcctttatcatctgaccattcagaacgcagcttatcagcttgtttcgcctctttataagctaacgtttgaccctctttctttaatccttccatcgctggtaaggaagcgagtacgacaacgtcaacgactggatttttcttttcagcttccattctcgctaaaattttaccagttgtcccttgaaacatttccacctttataccagttttcttttcaaagtctttttgaactttttctgctaacccttttggccctgcactatatacaacaattttcttttcattcgtatttgtactttttgcatctgcattaccctttgaactacaacctgttactacagccgaaaataataaagtacatacaaataaagacttaagcgaactgaatttcttcatacgattctccccctatatgatgaatacatttttttggcacatataacgatactggtttaccgatgcttaatttactattgtgataagctgtccatattccgagtgcccccatgtttacttttatttcataccgttctcctacatatgtaacgtgcttaatttcacctgtatacatttcgcacacttcatttttcgtccaactcacatgctctggacgaaccatttttttaccctctacaagccaattcgccttaccaacaaatttggcaacaaattcatgagacggtttcacataaatatcttcgggtgttcctttttgtaatactgctccttgtttcatgacaataatttggtctgacattgacattgcttctgtttgatcgtgagtaacatacagtgcagttaaaccaatggaatgaacgatatccataagctctattctcatttcttctcgcaaaattgcatcgagcgcacttagcggttcgtcaaacaaaataaaatgaggttttgttacaattgctctagcgaatgcgacacgttgttgctgtccaccagaaagttcgtgtggataccttttctccataccttgcaggcgaactcgctttattgcatcttctactttttctcgtaaatgattcgtttgctttgtagctcttaaaccaaatgcaacattttcaaaaacagtcatgtgcggccataaagcaaaatcttgaaataccataccgatattccgttcatgaggagatgtctttatcttttttgtagcagaatacatgcactggtctccaaaatatatttctcccttatccggttcttcaagtcctgctatcattctaagtaaagtcgttttcccacatcccgaaggtcctaaaagtgtagtgaattccccttgtttcattacaatctgcaacggctttaacgcttgtgtttttccaaatgttttttctaatccattaattttaatatccatcgtctcacctctctcccctcattcttaacctgctttcattctatatggaagatttatacttaatgttaatgtactgtaaagattaaattaaaaaacttctaataaactatttatttctatagattttttctatagttaaaataaaaaaggcggcaattcataatgaatctcttaaaattagaaattgtagtacttattaagaaatacaaaaagcttacaatcgttgcagaaaaacttggcgttaaacaaccaactattacttttcatataaaaagcttagaagaagaactcggtgtgtctttattcgaattacgttctggaaggtatttcttaacagaggctggtgaggctttgcaccattatgcttgtaaaatagatgcacttatgaaagaagctagacgtgtcacgcaagagtttaaagattttcataaaggcgctataacaatcggcgctagttatgtaccagcgacttatcttttgccagcagtcgttcatcaatttcaatgtgaatttcccaatataaaaataacgctactagttaaaatcgcccctgaaattcgaatgatgctacaaaatcacgaaatcgatcttgggataatttccgctgctccatttgatgaaccacttttaaaacaaacgaatataatgcccgatacacttgttcttgctttttccaaagaacatcatttttcaaagaaagacaatgtatcgttacaaaatatagaaaaggaacgcatactattgcatcgtaatccatctacaacgagagacttacttacacaatggacgttagcgcacaacattacattccaatcagaaattgaattagactcattagaaacgatgaaacaaattttaaaatatggtaatggaattgccttgatttctaaactggctatcgaacaagaaatacaacgaaatgagctatgctatataccaatccctgaatttgaatttcagcgtaatatttatacgattcatcatgaagacagatggaattctaaaatcatttcttttttactacagagcatcactacatttgcaacaaaaaattaaaaggctgtcgttatgcacgacagcctttcaaactataaatctatttatttttctttgcctcaatttttgcttgcgcctcttcagccttatctaatgcttctgatactttcttctctttttctttcacttcatctatactatcgacagctttaataattttatcgattccctcttcttctacctttctacgctttgccactctttcatttactttctcttccacatcttttgctttttgaagcatattctctgcatttgatattacagctttttcaagttcatcatcttttttcttttgtaacacttcatttgcaatgtctttcgcttctaaatacttaccgtcttttaatgctgttgctccctgatccattttctcagcaacttctttatatgatttcgcttcatttcctgatttctctttttctgctttttcgaaccacattgttgcatcactatacttttcatctttcaatgattgcatacctgtttcaatatatgtgtcataattgctacatccagccattacgactaatagaaaaagcataacaaaacttaattttttcatgctgttgtctccttttctttgcaagctcactttactttaacatacatgaaaaagagtttcaaaaactaaaatactaatttagtcatttttattttattaagtcacatttccttttagacagacacatccacttgctttttcattacatgcttctttactcctactaatacaactaacaataaacctacgcctaatgtcatcataacaatgctagttggcaacatatctaataataatccatacacaatcataccgagcggtgcgattgcagtagaaattgtttcaagtaagccgaaaacgcgtcctaaataacttggatctgtcgtcttttgcaaatgtacttgcatcgggatatttacaaccatcattgatataccagttaacatcataaaagcgatatagtaaataaaacttgctactttcgggatggtgactactaatggaaacactgtacataaactcaaactcgcaaataaaaacaacccaatataaacagagcgaaacggatcattcacttctttacgtactgataacgcaattgcaccaattaacatcccaactgctaacattccctctacaacaccgagttgtttcgaagatagatgcaaattttgaacaataatatatggaagtgaaacgaaaagtgcactcgcaaaaaagtttacccctactgcaattttcattaaaccatatatttcatgctgtcttttcacatatgaaaacccttcttttatactcgtcaagaaatgctctttactttcagccttttcttttttgtataaatcaaatacgataaacaattgcacaacaaccgctaaaaagaatgtaatgctattcaataggaaaaacgatttaattgaaaagaaaccaaatacaactccgccaataatcggtgctaaaatatttgataaagatgctgccgtctggttcaaggcactcgctttttgaatacgtccttcatctactaaacttggaatagatgaagttaatgaaacagagtaaaaactcgcacaaattgataataatgctgctgaaacataaataaacagaagtgatggcccaaaagtagttgcaaggataaacataataaacattgttaaactacttaacaaatcggtaccgatgacaagccattttcgattgacgcggtcagctacagcaccagcaattggtccacagattagccttggaatcgatccacaaataagcgtagttgcaaaccccattcctgaacccgttgtctttaatacgtataatcccattgcaaacgtataaataccggctcctagcaaagacgtcattttcccaatcatcattaaaataatatttctcgttgcaatcttcattcttgaatcattttgtcctatacttatatcccccatttttgacactctccccttaaaagttaaattgtgttaaacttattatataattaactttccaatttttacaacaaaaagtttaatgacatttaactttctaactataaaggagcaattatatggctactctcggtgaaaaaattaaaacgttacgaaaagaaaaaaagcttactcaaactgatctagcaggttcagaactcacaaaaagtatgctaagtcaaattgaaaatggaaaagctacaccttctatgaaaacactacaatatatcgctgacaaacttgaatgtgaaacgagttttttattagaagaagatgatgtagaaattgtaggactcattcaacaaacggagaaactaataaaagcaaacaagtacgatgaagtatatgaggttttactaccgatcgttcaaaaagagctacctcccactttgaatactgctcgtttatataaacagtttgtaacagctgcggctaaaatgaaagattacaatattgaatattacgttgaaaaggctacttctatttttgagaaatatacgttataccgggatagtacggaaacaaaattaaaattatcctttacgatattcacacgtaaaaaatatgctgaatgtttacaacttatagctagtatccgaaatgactatgaagagaaacatttagaaatggatctcattatacatatcgaattatatttatatgaagcaattatttttcttgcatgtggtgattacgaacaatgtgaaagtgtcattttagatgcacttgcattttcaaaaaaacatcaagtgtattataaaacagatgaattttatcgtattttatcttatcaaaaagtaatcacggctgataaagaacaatatttacattacataaaaaaatcagagcaattcgccatttttacagaagataatttctctgcggcggttattgatcttttaaaagctttctactacaacacaattgctaatgaatatacaattgcattagaacatttagaacaatttcgagaaaaattaaaagatgagccaatttttcaagatgatggatcatattatcttgaaaaaggaaaagctttgtatggtttaaaacaatacgaagaagctttaaaaacattgcaacgcgctatcataccagattatataaaccatccacttgatcacgcacggcttacaacagctggggcatatcgcgctctttgttatgtgaaacttaatgataaaaaaagagctcttgaagaagtaacagaagcatatgaaatcgtacaggcctatcctgattccatcttcacttcatttattaaagaaacattacaaataatacaaaaactttaagaatgtctctaaatggtatattattcctcttttttagcaaagataataatgatgggaggaatataaatgaatatacaacgtgcaatagagctttctatgtcagcagaacaagccaatgtcaattttcaaggcatgcctgttatgattcaacacgtcgatgaaagcaatgaaaccgcccgcatatatgaagtaaaaaacccaggacgcgaattaactgttccagttaatagcttagaggaaatataagaaatgccacttctcttttgaagtggcatttttcttctttcagattacttattataaatttcttcaactctttattttacatgagctgaaaaaataagaattttctacttcttttctttttgtgacctgctaaaatacaaactatggattaattattcgtactatacattaaggaggaaaaataatggcatctaatttagaaaaaaaccagccttattatgcagttatattcacttctaatttatcaaataatacaactgactataataccgttgccgaagaaatggagaaacttgcaaagtaacaacctggatttttaggtgtagaaagtgcacgaggtaattctggactcggaataacaatttcttattgggaatcacttgatgcgattgaaaattggaagaagaacaccttacataaagaagcgaaaaaaagaggtcgtgagcaatggtatgaaaacttccacctgcgtatttgtcttgttgagaaagaatttaagtttcatagaggtactttataactatgaaggaaaaattagctctcgttattgttcatgaaatatatggtgtgaacgaccatatgcatcacgttacccagcactttacttcatctcatatagacgtattctgtcctaatcttctacacttacaacatgcatttcattatcgtgatgaagaaaaggcatatgaacattttgtaaatcatattggatttgatgatggaaaaaagcaaattgaagaattcatttctcatctttctagtagttatacacatattggacttatcggctttagtgttggagctaccatctcatggctatgtagtaacaatccgaaaatagattttattatcggatgttacggttctcgtatacgcgactatgttcacataaagcctacatgctctacattacttatattccctgaaaaagaagctagtttttcagtatcctctttaattcacacattgcagcaacaaaagaatcctttattagaaataaaacaactacacggtgaacatggatttctaaatccgtacactgaaaaatataacgggcactctacaaaacaagcatacaatttaatagattcatttcttgtaaagtgaaacttcaatcagtggggggggggcatcccccacctaatctcttttcttacgttgagttttaaggtgtgggtcttactgcccatgcgtgataaaaacaatcttatacaggagactcaaaatgacgctgacattactcttacttgttttcatactcattgcctttatctcagcgctaactatcatttttaaaaccgtaaaaaaagggctatttttcaaccgcccctacttacaatctattatcgtttgccttttattttttactaattggatcttatatgtaacaactttttattcgttacttcccgagaaaattagtgagttcctattcctacccatttggtttttcctttgtattttaggttttataactttctggcgtgaatggggaaataatcgtgtattctccatatgtatcggttttctttccttgactagttttttatttggattattgttgttagttctttccgggatgtaatagaagaaggaagaaaagccaactttcaacttttcttccttctatgtttacctttagttttcactgtcactgattcacaaggtgtataatatatttgaggtgtcgccttatcaacaaacatcataaacgtaataaagccgataataaagaaaataaataacgttaacaaaattgctcctatcgttaaaagtatcataacaccacccctatatttttcatgttattacacttttcgctatgatatgagtgtaatcctttttagaaaaggaaacgtaacaaaataatcacaatcactcccgttaatactgtacctaataaactacgagtatatatcgctacaagaaatgttggaattgctgcaataagataatcccactgcatcgtttcatgcataaataaaacttgtgctaaaagcgctgctaatatcgcaattggtatgtaatttaaccattttaaaccccagtcaggaatttgtagtttgctaaatacgagtagaggtaaaatacgtggcacgattgtaacagctcctgctgctagtaaaagtaataatacatctaatctcatttccatttttcaatcaacactccaatcgtcgcagctagtaaggttgcgataataaccgctatactatctggcataaataggtgtgaaacgtatgcgataataatcgctacaattgcaacacttaaatgaattgctagtttcggtttactacttatgagctgaagaacaaataatccgataaacatcgctggtaatgcataatccatgccgtatgtatgtggatctggtatccactcaccaaatagcccgccaatgatagtggcaagaatccaatttaaatacgctgttacattaagccctatcatccatctttcacctaaatatcctttttgcgcagcatgctgcactgcaacgccgaaagtttcatctgtaatttgcgaaccgatgattaggtttttaaatagaggaattttcgtaaagtacggtgcaagtgcagcactcataagaaggtggcgcaagttaacaaaaaatacagtaaaaataattgcggaagcaggagcaccggctgcatacataccagctaatataaattgggcagaacctgcataaattaaagtggacataaatgcaatttcaatgatggagaaaccagctgtttttgcaattacaccagctgctataccgatgctcaagtaaccaaatacagttggtaaacaatcttttactccttgctgaaatgtatcgtcactctgcaaagctacatgtgcctgagctttactcatctctatcatcctccattccttctaaagttcgttttcctgttacgacatgaactaaatctatattttcacgccataacgtatctaacttatcagctccaaattcctttgtgatttcttcaaccataatatcgtgccgcacatactctgtagcaacgagaactagcgctgggtcatacgttgtaacggcccatgaagtgctatcatttgagaagttcgcaattaatacttcctctccatcacgagcaataacagttaaatgaccacccattctcttttcaacaacgtggggcgtcatataattatgatgaaacgtcgctcctatttttgtttctggagctccaaataagattgaaaatatatgtacgccttcctcttccttttgatgaatgtatggctcaatttcatgcacttgttcttcccatacagaaatccataattcttcctttgccctattaattatattgcatatttcttttaaaacacgatcatttgagcgaatatgcgaaattacatctatttgtcgctcttgttctaaacaatttaatttctcatctaaaaattcaaaggacttttcaaagtcttttcgcattcgattcattaattcggtagctggtactggtacatatttaactggttcagaaggtacaatatgcaccgctcctttatccattaacttaccgagtacctcgtaaatcatagaacgaggtactcctgtttgtttactcacttcatagcctgttactggagaatgttttaacaatccaatatacgctttacattcatattgggaaaatcccaacttttgtaattcctttataatttcatccatcggtaacccctcacaatctaaatcgctcttacttcaaaacgacgattttgcttccctttactttttactttatcaataacaagtgttcctatttcactcgtatttttcacatgtgtgcctccacaagcttgttcgtctaaattttcaattgtaacaatgcggatttcttggatagtagttggcaggagatttattgctgttttaatcattcctacagcattttctgcttcttcgcggctcatataacgagtggaaatttctttattttgcttaataagtttattcacttcctcaacaatttcttctacttccacgctcgataactcttgtaactcattaaaatcgatacgtgctttatcaggataaatttgatttccggtgcataaagctccatacttttcataaacaacagctccgataagatgcagtaaagagtgatgacgcattaaattatgacgtctttcccaatttatctctaatttaactggacctaactttacttgtgcttcgtcttttatatagtgaactatttctccttgctccttctttactttttcaacttcaaatacagacccatcttgtacaatgacacccgtatcacattcctgtcctccaccagttggataaaaaattgtttcttttacaaatactttattcccttctactcttatcacttctgtttcgcaactcgttttgtatgcatcttctaaatataatgccgttgtcatactctcacctctttagtagttatagttatacctactaatataaaaaagaagctctgcaaagtcaattgataattctgaaatttaaaattaataaaagactcctttattaggagtccactatctcaatatttcattcgcttctttttcataaattttatcaaatgacgtcataacgcgctgtgatgcttgaatcatcttttgatctgtcataagatctgccatctctttcgtcatatcaacatttgaattttctagcatatgattttttactattcctgttccgttcggtaaattagcaatgtttccttctgctagtgtaaagcttttgttttcacgttgcacgagacgtgcattcgtttcggcatctactgtttttgtttgcaaacgagcaatattattttgtgttacctcatcatataatgtaccatctgcttgtacagcaacctttgctccttctggaatacgaatacgctcattattctctcccattacgaaagcaccagatgatgtttgtaaataacgatcactatttaatgtgaaactaccatctctcgttaaaaacgtttcatcatttttagaagtaacgaaaaatgatgttgtgccggccgcgccgtcatctaaaaagaaatctgtagcgctatttgtcatttgtatatttccttgtactaaattcacatgcgttgcagctggtactacagcgtaatcgaccgaaccgatatttgttaccgccccatctccgcggcgatatgtgtcttgtacatcaaatactttagacgtcatattttctgctttaaatcctgtcgtttgagcatttgcaacgttattcgaatgaacattaatgcgctgcatgtaattcatcatgcccatagaacctatataaagaccgttcatattcgtttgaataaggcaagcgccttattcttcacctcttttctacgatgtttgtaacatttgtttcgctaaatgttcagctgtagcgatatgtatatttttctttatgtcttggccatctgtcattaatacaataggagctgatgatactgctggaattttcaacaattcgccactacttgctgtttcatcaaatttcgtaaacacaataccatctatatgaatatctttaaagtttgtaataatttcaatcatatctttacttttcattgaagctgataacgttaaacaaatataatctggttctacttgtcccatcgtttcaatcatttcttccactgtttctgacgtacgataatttttccctgctgtatcaattaaaatataatcgacgcgtgcttcttctttaaaatacgtaagcgctcttgtcattgcagcttcatcacgcacagcaattacttcagatccaattgtctttacgttatcttgcaattgctgtactgttcctatgcgcgaatgatctgtcgttataaaaccaactgtttttttcttaccgtgaaattgccatgccattttcgcgagtgtcgtcgttttaccaacgccagttggaccgattaatgcaattgtttgtacttctttttcaaagacgttttccgtattgaaatgagatttcatatcttccaatatgtacctgataacttcttcttccgtaatcatcgttgcattttcaaactttatttttaacttttcagcatatgcatgaatgaaatattgttccacatcgttttgttctagcatccgaattactttttgaataataaacggtacagattcttgattttctttctttggaactacttcttctttctttactggaacgacttgtttcacaacttttttctttttcgttactttcgttacttccgtttctttcatcggtttcacaacgacgattcctttttcaaacagctttaatagtttctctttttttcttgcccattcttcactatttcctgtttgcatcgccgcgtatgacatagaagtcgttacgttttctaaattgtgcagtactgattgaattccattcgccttcacaatttgttctgaaggatcattcacaacatccattaactgttcatgaaattgagctgtaccttcattcacttcttcctgtttttcttctggaaaagcaactaacatttcataatcctttttccaaaaaaacggtatatttcgttttacactttcatcgacaacataataataatctgtaccatattggtcaaataactttcgatacaattcatttttcgaagctgcttttattcgcattaacgcttctttcttttctgtactttccattacttcaccccctactattcaatataggcaatttgatccacaacaatttctggtgctaattcactaatacaaagtacttgtgcttccacttgataacgttctagcagtcttacaatcgcaaatctaaaatcttttctacgtgttaataacactggttctcttcccattaaacgtgcttgcttaaagacgcgctgcacttgctcaacgacacgtgtttctaaatctaaatcccagtttaataagtaaccttgatatgaattattcacaacatccgcatctaactcgattgaatcagagaagagcgctgcatatatttttccgtccggatttttcgcattttcacaaataacttttgaaatacattcacgaacaaatgatgttacaccatccacgtggttttgataaatttctttgccgtcaataataccttcaataattgttggtaaatcacgaatagaaataccttcttttagaagttgtttaataacattttgaacaagtgataaatcaatttcttttttcttaatctcttctaatagaacgccattatcattttcaagcgagttaattaagtcttttacatgttggcgctgaattaattcatgaagattacgtctaacgacaacatctaaatgtgtaattaatatgctaagtggctctaaaacttgatagcctttcatttgtgcatcttgcaccatatgctctaaaatccaatatccatcttcaccgaaaattggatctttcgctggctctgcatctaaatcagccattacgtttggtgttttcagtgctaataaataacctgattttaaaacaccttcagccgccttcgcacctttaattcgaataatgtaacgtccgcgtggcctaaagctcgtattatctttaaagttaattccaggaacgttaataccaaggtcagtaataattgacttcctcataagaacaactttatcacgcgctgtttccccgttaattttttgctttacaagtgctgctaaatctaaaccgagttctactataattggatatttatccgtaaatactccgaatgaatcttccacttgttgcagttgttcatcttcgccttggatcatttctatttctttttgaagctcgtcttctttttctttctttattcgatttttattacgaattcctaagaagataattgttccgccaacgagtgcgaatggtagaaacggtagcggagtaaaaatacccattgcgataaataaaccaccgagcgcatatacaacgacttcatgcgctaataactctttaaagataccttctgttactgtatccggtgaaccgtcaaatacacgcgttacgataatacctgttgaaattgcaagcattaacgaaccgatttggtttacgattccgtcaccgacagttaactgtgtataatgaagagccgcatccgcaaagctcatcccttgctgcatcattccgacaattaaaccgaaaataatgtttacgaataaaatgacaatcccgaaaataacgtcccctttaatgaactttccggcaccatccatcgccccgtaaaactctgtttccatatttaatttttttcgttttgcttgtgcatctttttctgaaataatacgctggtttaaatcagcatcgatagacatttgtttccctggtaaagaatcaagtgtaaaacgagctgcaacttcagctgtacgagacgcaccgtttgcaacgataaactggaatatgattaatactgtaaaaataacgataccaattaataagtttccgccaattacgaactggccaaactcttcaataacatgacctgcatttccatctgtcaaaatcgctcgcgtcgtcgaaacgttaatcgatacgcggaaaatcccgattaataacaacatcgttggaaatgactttaattcatcccactcgttaatacttgtcgctcgcatataaataagcactgacatacttagtagaaaaacgataatgatatcaagtataaatggtggaagtggaattaagagcgccactacgaatgacgctgctaaaaagatagaaaaataggttcttgcagaatctatcttaaacaaagagatctcctccaaacgcgctattatacttcaagttcattcgtctgaattaaatagcgcataacttcaattacagctacatataaatcttctggaatcgtctcatcttcctcgacttgataatataaagaacgagcaagcggacggttttccaccattggtatttcttgttcacgggcaagcgttcgtatatataatgcgagctcatcttccccttttgcaacgacaattggtgctgcatcaacgtgtttattgtaacgaagtacgaccgaaatatgagtcgggttgtttacaataaacgttgcgccatccatcttcttcgcaattgttccttgcaagattgcatgcataaagttttttcgtttccctttaacttgcgggtccccttcattatctttatgctcttgtttcacttcttcttttttcatcttaatatcttgctcgtactcccatttttgataaatgaaatcaataatagaaagaacgattaaaataattaaaattgctaagaaaataaatttaatttccctaataatttcagtaagggatgcagtccagttaaatccaatcatactgacaattttctctaaattctttttaaagagaacgtaagcgacgtaaccgattaatcccatataaaatagtgatttcaaaatatctactaaacttttacgactaaacagtctcgtaaaatagtttttcggattaatacgtgacgctttcggtttaatgactttagaagaaaataggaagccgacttgaatcatataattgaataaatgaaaagcgtatacgagtattaatatcggagccgatactttcagtaataaaatccccattaaataaaaatactcggttgaatctgtattttttccaatttgatcaaacagcaccgctacggaatttgcaatctcataccctagccaatctccgaagaaataaacgacaactgctaatacgagaatggaaaataaattatttaaatctttactccgggcaatgttcccttcttcacgcgattttttacgcttctgcggggtggccttttctgttttattatcctttgccatgcgcgtccccctacttcgttaagaaaaagttaaatagtttcgtatactcttcaagtaatacatccgtcatatttttaaacacataaccgagcatcggtacactcatcgcaataaacaaaatcccacatgtaattttaattacgtatgcattcataaaaacgtttaattgcggagcgttttttgcaattaaaattagaacaaagttaatgatgaataaacttcccataagcggaagagcaatttcaaccgctgatgtgatcgcaaataatagcgttgcgagtagactatctaagaaactagtcgtcaacaattttgaaatcgcctctgtatattgaaacgactttaaaatcgtggcaacgaaataattaatgccgccaagtgaaataaaaataatgagaaaaaatatatcaaaaatggttgatagtaaagtagactgtgagcccgcatttacatcaaacaaacttgcttgtgataaaccgatatcaaagtctaaaatatgcccggccattttcggaatgttccacagcatttctacaatttttgaaagtgataatccaattacaatttgcgttcctgcataagctgcaacgtcccaaactgtcttgatgtgagagacatccacttgatcagccactgtaattgaaagagcaagtccaactgtaaccttcgccattgctggaatggatcgtcctgagaaaaacggtaaaaaatataaaaatgaagtaatgcggcaaaacgcaaaaaacgttgccgcccataattccatattcatttcagttcacctatcttagtacgaacgcaatagcgatgggattttatcaaataaatctaaaataagtgtcgttaactcttggaacatccacggacctaaaatgataataacgaggacaatactcgccattttcggtaaaaacgtcagcgtttgctcttgaatttgcatcatcgccataatgacagcgatgataataacgacaatcatacttacgccggcaaccggcattaaaatcataacccctttataaaaaaaggtttgaaaaatatctataattggtgacgtattcatttatatgactcctatcacatagcatcaaacgcttcaggcgaccgttttaaacataatgtcgacgatttttgtatatccacctaaatatacgaaaacgagtattttaaacggtaaacttaaaatcatcggcggtaccatcatcatcccgaggtacattaaaagtgtactaataatcaaatctataaatacaaacgctaaataaatgaacatccctgttagtaaacctttttgaatttgcgttaacgtaaaggatggtacgagcgtaaatagtgaaagatctttcaaatctttcggcaactcttctccgcgtactttcagcatcatttttaaatcatgcttatacgtatgctttgacatatattctttcataataggagctgtcgtttccgcagcttgacttactgttattttctctttcgtcatcggatcccacacatcactcttcagttgcccgagtacaggctgcatcgtaaagagtgataaaaataatgcaagtccaacaagcacttggtttggtggtaaattcattaccccaagtccttgacgtgtaatccctagaacgatcataaaataagtaaaatgtgtaaataatagaacgatagaagaagataatgataaaagggtaacgagcgcaaatagttgtacacttgaattactcgtaaactcttttccattttcgaaattaataaaaccgttcggggctgcatacgctggatttacaaaaataattgaaaaaacgatagaaaatacgaaaataacggctaataatgataactgtttctttattctcatgatggatcctctacttttttcgtttcactcttcaccgcgtcttctagtgcttgttgaaactgatttcctgttccggttaattgcacagactgcacaccgttattactaataacagtgaacacttgctttccgtccacttcaaataaaaaggcactcgtttgatgatttaaataaacgccgtcttttacttgtatatggccattttcaccctgcttaaaaaactgctgtttgcgcgtctttttcgtcatataatatgcaccgtagccgagcgcaccaaacagtaaaacgacttgaaataaggtcgtcatatacgacatatgactcctcctctactctttatcttgcatttgactttgcgctttcataagcgccgcttgtttcttatcagcttcaatttcagaaatgataataccgaatttctcgtccattacgattgcttcaccgatgccgactttcatattacttaaatacacatctactttatgtcctaagtttttctctacttcaagaacatcgccaacttttaactgctttacatcaccaagtgtaatagatgactttccaagctttacaccaagttcaatcgaaatatctgaaacagtatcaatatgtgctttacctgcttcatttcgctttcctgcaaaatcttctaatcccattaatgacacgggagatacttcatgcttcatatggatcctcctactctacaaaacttttaaataggagcgccttacgcgttccatcttttccaataaaacaattaaatttatgctttccatctacataaccaagtaattcatccgaaactttcgtatgaagcggaattatatcgccttcttcaatttgttcaatctcactcattgtcattttctgctcaccaattgcaacgtgaacaggtttgtacacttgatttactttcatttccacttcagacatatactttttacgtttatctgaagaatgttcgacaatattttcagacgttaacttatccataatttcttcaacagataagaatggaattccgatacgcaccgtcgtattccaaaaatctgttttcatatttacgttaagtaatgaaatgatatcactcgctgtcgtaatctttaatgcattcggatctgtttctgtcgttacaaatttcggttcaatcgcaacaacactttcaaatgattgctctaaatttttacaaagaagcaagaatatattatcaagcgttaaaaactcaaacgctgttaacggtctgcgcatcgtaaagttacgcttactatctccgccaagccaacattcatgaatataaataacgaatgctaaatcaatctcaataacaatttctccaagctctggtaaaccgagatcaattacgcaatataaataataatctttcggcattttctccacatattcactcgtaaatggaacttgctcaactgttgaaggctctagttcaattggaatacgcatacgcgctgataacgtctgtgacgtctgttttccaaaagtagaagcaatcgcttgcaaactacgtaaatgctcaacaccgaacttctctggtctattaaaatcatactcttgaaatttctcttgctttcctgcttcttgtgcgaaagctggcatttcctcgccttcatttaccgccttcagcagggcatcaatttgctcttggcttaatttttcgccactcatgacaatccccttccctaccttttcaattcaacgatttcaacgtacatttttccattcttcgttaaaatctttccggttccaatctcttcattctcaagcataagacgcaccgtatttttcgttgaattttcaagacgatacaatgtacctttcgtaatatgaagcagatcttcaattttctttttcgtatttccgatttcaaaataaattgttaacggaatatcatcttgtaatttcaaatctagccaactcccatatcatgttcacgaaaatttcatgttctctctatatatgaaacttcttattttgaaacgtcgatatttaatatttttttaatatatccttgcgtttctttaaatggcggtacgcctccgtactttctcacattaccaggaccagcattgtaagaagcaagtgccaatactaagtcaccgttatttttctttaaataaccacttaactctttcacgccaccttcaatactttcagctggtgaaaagggattcttcacacccatctccttcacattcgctggcataagctgcataagtcccatcgcaccggcatgtgacaccgttttcggattaaaattagactctacttcaatcattttttgaattaacgttttcggaattccatatgtacgacttacacgatcaataatatcctcatacttcccttcattggaagaacgtattttttgaatattatacttcttcgttaatccccacgtatcagcagcctcatttttcgtttctgggaaacgtcgttcaaactctttttgcgcaacttgcacttcatctgctttcttcgtttcacccttttcttcgggcttactcgcttcatctacttttttcgtttcacccttttcttcgggcttactcgcttcatctactttattaatagattgttccggcttattaacaaccgtttctattttcgtagattgttccggctgactcatatcttctatttttgccggctgcgtagtagccttcgtctccctcgcaggttcactctgcaacttctcttgaaaacgactactaacaaatgcttgtggactacttagcttttgctgaatttgtccttttttatatgcaagcacttcttttactatatttccaactaacataatatcaccttttcggtaaacaaagataatctaatattagagtttttttttaaagtttgcaataatccttttgataatattgtaataaaaaaatgaacaaataggaaattatcatttttttatattcattaattacaattattcgttgacacgatatacaccaaggattacaattaatctcgaaattgatttttttgcatatttacgtttaacaattaacagaaaaatcaatataaaaaaatgggggttcttaacatgagaattaatacaaatattaatagcatgcgtactcaagagtacatgcgacaaaaccaagacaaaatgaacacttctatgaaccgtttatctagcggtaaatcaatcaacagtgcagctgacgatgcggctggtttagctattgctactcgtatgcgtgcaaaagaaggcggattaaatgttggggctcgtaacacacaagacgctatgtctgctttacgtactggtgacgctgcattaggttctgtttcaaacatcttacttcgtatgcgtgatcttgcaacacaagcatcaagcggtactaacaacgataaagatatcgcatctatggacaaagagtatcaagcattagcacaagaaatttatcataaacctttaataaatactgatttatgttctcttttcgtagttcaactacttatagagaaacgtgtcgcaccatgtccccattcatgacacaatgccccgactccattatcacgagttaaattaatgactttggtagaaggttcataatgtgctaatgtattgccgcttcctctcgcaccaattgccagccctaagcgtcctcctagccctatatactcaggtggaatccccaatatacgggctacatcatgtaacgcctcagatacatgctcaatatgttcttttgcatattgttcggtgcaataatgtccaaattgcattcccttcaatccaaacatagtaactacgtcttcaggtttggtagcaaattctatttctggtccttttctttggagggtatctggcagtttcctactccaagcagctgtggatttcttacgagtcgtaacctttttcgtaagtaaatcattccatgttagttcatgtgatacacgaaggtatgtagaattaatactttttgaatttgtacaaagtgatatgaatttctttcctaatattaataactccataccatctgcatcaacaaattcatcaaaatattcttctaccattcttttaaatgtgtatgtgacattcttatcttttttaaatgcataccaaccgttttgcatttccttaccgtaagaaccaacaagatctatccattgttctgaggtatgtattaactgtatatcatgccaaactcttctacatgcttgcacatacagtttccttgcagtcggtgtatctacaattggcttcttatcaatcctgcccactagcagttgctttaattttgcaacacgtggcgggacatcattttctttttcatgttcaaaagagaatggaattaatgcgtttcgatccaatgtattgagcgcttctactggagattctttttcaatttctgctaaaacttctaaagaaaatgatactaaaaatgattcttttaaggctcttagctctttcttagctcctactaatttctcaccaacatcatagctgtattgattgcgaacttgtttatctgtcctcacatcttgtactattatgttttctcttacctctaaatcgaacagttcaaataaattcatgctaaaatcctcctttataaaataaaaagacagaaattcatagtcgtttttcactacggatttctgtcattccctctgtctgtagacttccatatagttatgtaaatcactcattacgatacactcacacctgttaaagagaaaagatcctcttttgtcggatttagtgcttgtaaccagctatctacctccagaaagtttactttttttaattgttcgcctttttccgcacgcttaaccacctctaaacctccatgctgatgcacaatcattacaagatcatctttcttgaaaatacaatctacatctgcagaatttatgtggtggttacgtagaatcggtttccattttttaagtgaataaccttctacatctaaaaaaccacggatagcagtaaagcgaaaactcgtccctctaaaacatctttccaataaaaaaaggaaatcccgtacacatccattaaaatgaacatgatacaaatagatttcccctgcttgtttggctgctcgctgtgacaagtttgatggtttaatggaaaactgataacaatctcgttcccaaaatgctccttcctttgtaaccctcattcgtaatgcacgtaaatttggcataaaatcatctggatgtgcagaacaaaatatagatacttcataactcattttcatttgaatttccccctggttatatatttattatttttctacttcacaacaattgattactttacacgtagaatagataactcaaaaatatgaagaaaaagtaatactcgataaagccacggcaaatgtttttctccatgatacatgtaaagttctttcgtttcccttctataagcaaattgaacacctaagtgtgtaggaagttttgatatgtcctccatttcaacgttttgaataatctcaataacggtatgggaggactcctttaataatttctttaatggctcaagaggaatattaaataatctactacactccttagttcgctctttgttatatttaataattctggccaattcttctacagtcggatcaaataaaggatttgtaacctctacatactcagacataactttttctaatgtacaatccatcttgttaataatataaagaccccactccttaaacatatcttctaacgtacatggatagccatacacctctaaacagtacttcctttcaaatggaaaataacaatcttcttcacaatcatggcgtaaaattggtaaaaaaatcgtattgtaatactcatcagagttgatgtgtaaggctgtcattttatctgcaatatagtcttctgtatcacggaaaatgctagaattacgctctcgaattggttgagtaacttcattcctctgaaagatttttattatctcctctagtgatagtaatggtttatctagtgtaattgcatgttcgtatttcattataatgatccccttccaaagcaaaaaaaacacaaatcttgtgttttttctcacagtgttttttatttgtatacctaaatctaaatacctttttacaagtgattcctaacttgaaaacaacacaaaaagggctccttcaagtcgattaaaaatgtgcatagcaaaataagctagatatacactaatcggctcaaagaagccctttcaaaaatgaaacaagacgcaacttgcttctacaactcaaccacaacacaataaggtgtgggaataaacggaatcaattaaacattaaatatatatttatattaatcaattcgtatctaaatttcaataactttatgttttatcacaaaaatgaacttatttattttagtttttttcgaaaattatgtataataaaattaccctacacgagatattgagtcatatctcattcgtcatttaataaggcctatataaaaaataaggccttattttttattcttcctttatttactattaactaaatccaattcgtgttacaatcagaacaaacacacgttctttagaggaggattttcatgtttaaaatgttcaaaaaggacccaaaaaatgaagaaacagctattttggtaactaaagattcatttgatattttcttatttcctactagccatgaggagcaataccatttagtaatagaaaacttccacgtaggttacaatcactttttactattcgttgatagaaaaaatcatgcattgcacatttatgatgacctttatactattgttggcggaacaagtgctattaacctaattagcgaatatctaattgaaaaactgtacgaattattgcatttaaaagactataaaaatgcaaaagtactaatttacttccctgagaatcataaagattccggtttagtatcttatggttaccaatcaaaaaaggatgattttgatttcggacttgatatcagtgaaataactaaacatgaagcatatttagaactagctaaaaaaaatgcatagttcattgagctgtataaattaataaaaagacaaaagttatgtacttttgtctttttattttaacgcaatccattcgtagctttcccactcttttggtttcttatcatatttgatacgaccagtcgtacagaatgatgcaatcatccattgtatgagattcatttttgcatacggatcaacacaatcctctaattttttcaattgataacctgtactatttttctgccaaattgtatataaacgaaagtgtgttgtcgtaacaagtctagcttttgttgtaacttgccattttgcaattttcgttaaatcctctttgacttttctatcatactcttgttttatgactttataactcttatctttattaattaatccattagagaatccaaaaggcatttgatgcacctcataaacagctccttcttcatctcctaaaatatttgattctactagaaatatattttttagttttaattgttccgttaattcttttccgctccgataaaatggcttctttatcttctgcaacaagataacctgcacaattaatccgataagtaacggatacgctaatacaaacaccatatgaataaacatatttgcaataagcacccctactagtacgaatatcgtgaaataaatatatgtttctctttgatgaataattctactattcaagctaacatacctccgttttgatagatagtgaacgaaatatacaccattgcccctagtaaaatagaacaagccccaggaaagctctgtatcagctgtatttctttctttggtagttttgccccaaatatagaagcagcatgctccaattggtctttaatcgctcccacaaaccctaaaattttaattaatcgatacacactagcaatccaaaagaatagcaaatggaaagctgttaatgtaatggcagtaagcatagccgattcttctactacattgctaatatataaagctaccaccacaagcatcttggtatcaccaggtgaagagaatttaaatgtctctagcaataaaccacacgctaaggccatgactagtacaattgcaatctctttccctgttcttattccggcaaggtacgtaattcctatccctactattaagaatagtagatgccacatattctttgtttttctatatttcaaatcagtaaatacatttaggaacatgtaacttagtaataatcccacaatatacagacccattttctttactcccctcttaatttcataaaaaatgctgtgtaaaaaagggaaccacttttagagtagccccctcgtttatttttacatttattttttattccaagaatcaatatctgcattgcttgatgcttttgtgaatcttgccaggatcgtatcatagccaccttggattgccttccatacaaatgggccaatgactaatacgataattaccgccagagcgattaacataccgttttctgatgataactgtgaatcctcattttttaaccaacttttcatctttgctaacatttcatttcgtctcctttatataccgattttaagaatctattaaaattagaacttatctatttaaatctttcattacttattccaagaatttacgtctgcattgcttgatgcttttgtgaatcttgccaggatcgtatcataaccaccttggattgctttccatacaaatgggccaattactaatacgataattaccgccagagcgattaacataccgttttctgatgatagttgcgaatcctcattttttaaccaatttttcatttttgataacatgattgaatctcccttttccatttatttgagctatacgtaataaacatcattaatctaaaacttctattacttgttccaagaattcacatctgcattgtttgatgcttttgtaaatcgagctagaattgtgtcatacccgccttgaatcgctttccatacaaacggcccaatgactaatacaataattaccgccaaagcgattagcataccgttttctgatgataactgtgaatcctcatttttcaaccaattcttcatttttgttaacatgtgtaatgctcctttacctattccatttttgataacatcttctataaacttgcaaatccttgcattaaggattgaataacaatcaccattggataaatcacaatacatccaataactgcgacgttaaatttattcatttccattggtttattttgaatgagacggttatagttctcatgttttaactcacgcatcattttaatctgtgcatccataatacgaagactctgtaccttgtccgttttttgcgcttgttgcaatgcaatcgtaaaggtatttacttctggactatttaaagcagcagcaaagtttcgaaatggttgatccgagccagcatacatttctaattccgcagtaagtgtagatacatacggacgaaggtgtctcccggcatatatctctgccttttttactgcttctaatgttgtatgtgtttttaacagctgcagcataggtattagatactctggtaattcgaacttcctagcttctatcgcctgcttgattcttctctttaatagataatcaggatagaaataaagcagtggtgaaatcaaaactcccactttaaataagtagtaatcatggaacaccgtacatatcaagaaaacagaggtgaaaatgatgggatatgctaccttcatctttaaatattcttctggtttcgtatccaggccagcttcttctaattttttctgaatctgctctttcttttcttctgtcaggtacttatgtgataacgactggaagggcgcgagcatcatctgatttaaattcttcttttcaattcgttttgcattttctacatagttcgtaagtaagctaccgctgtcttttttactttgtagaaaggtagagaatacccagtacatgacaacgaataccactacagctaaaatcgtagccaccttattcccctctttctgttgggttataatttgcaatcttttctacacgggttgctaagaaaaagacaatgaacatatttaccgctaacgcgattttccccatcatagaacctgctaaaaatccatatgcttcttttgacatcaacataataactatcggcatagcgatgacgattaagcagttctgtacaaaagcacgttgtgcttgtgacaaactagaacgtaatcttgccaaatacagcttttgtttttcgaaatcttctgcaatatctagtaagacttgcactgaatttgttccaccttctcggctgcacacttccaacatttcatggaagaaaaccaattctctaaagttaaacgtttcattgaatcctctaaatgcacgatgcattgtggttccaccttctaataaaagagaaactttctctatttcttcttgaatgctttcatgcatcattggcttcacctgaactaacacccgttttgcattgttactaatttgaagcgcattcgctactgccttcatatagatagatagacggtcaatgacaaccaagtagtaacgtttttttcttcgatagagaagaaatcttggaactaaaaatccacataaaacggaaattagtgtaaaaggatctcgtccaaaggaaaaatagaataccgccgcaatactcattccagaaagaatcgtatatacccagtacatgcctttcgtcaatttccactcgtacttttgggcttcttggataacggattgcggtagatacacccgtatccccttaatattccttaactccaagcgcctttcttctttctcattttcttgtacaaattgggaaagagcagaacccttagattttgcaaaaagtaaaacgagcaatactacactgataaagattaaaaatatacatccataagccaacaaactatgcatactgcacctcctgttgtgaaaggaatggcgcataaagagctggatttacagtagaagaacggaatttcttctccatttcggctgacatttttgctgtaacgatatgatccccatgaatctttcctactctctcatccatttcatcgaattcctcacctgaaggaataaattgagaaagctgattgaactgtatatcatcttgataatctaacaattcaatcatctctgtaatatagcgattaccatcatctttcttttctaaaaagacaatcacatcaaatgtctgagaaattaattcatataaatactgagcatcgatattcgcaccactctgcagacacatgagcattaaacgtctaactgcttcttttgcacttcttgcatggacagaggtaaagccaggatgtcctgtttggaagaagttaatcattttcaatgcttctttccccctcgattcccctacgattaaacgttttggtccttgacgtaaagcatttgttaacaacctatcaaaatcgattgcattttcttcaacctcggatgccctacactgcatcggaacaaaatgatgttccggaaaaatgcgatgcaaatataattcagggttatcttctactacaagagtacgttcttttttctttcctttcggaatgtgagaggcaagatatttcataaactctgattttccggtacctgtagctccagcaactagaatattcattttggctttcacagctgcggccaaaaagttcagcatttctttcgatgcttgattggtagttaacatacgttcttcagaggcacggaggtgatctgcattcttacgaatcgttattgttgttccgagtcccccaagttcatctaacgcaatattgatacggatatacggaaacacgcagtcaacatatggctttgctgtatttaatgactctgatgtactgtttaccatcttataagctagagctttcacttcttcttccgtctcaaatcggtaaggaaatgtacattctccctccccaattttttcgtaaatgatttcttttgtgccattgatataaatatcagttacatctttatcttcttttaaaggttctataatcccaaaccccacaatttcgtcacacaccatatttagtaattgttcagaaggtacctctgaaatgacaacctgattactcaataaaaagcttttaataatttgttctacagctgctctcttttctttattcataaaggattcacttaggatatcacgatggtcttttactaaaaatgcacgaatttcatctgtaatatctttaatttgttgagctgtagttgttcctaactttcgagctgatttggaacgaatcatgtaaccaaagtgatataaatccacttgatttcgctttaaggcgatttgtttttcctgtaaatagccccacatactccttgtcccccttttaatttcgtaaaccaaagagaccctttttcatagaggattgctgggatggaataccaagaccagctgcttccataatgtgatggacctttgtattaatttgcggggaaccaaattgcatcccccattcgtaactcgtacgatctctgtcatacggaatggttactgctattttttgagaagaaagcttttcaatatcttctacataattttcatctgccatgttcaaaacatgaatcatacgaggcattgttagctttgcatcttcaatcagctttaattctcgcttaatagctaacgcaccacgaggatttccgtttagcacatgaacaacaaggtctgcttggtataggattggataactcagcacctcggataattcagttggcaccgatagaatgatataatcgtattctgtgtccacaagtgactccataaatgtagttacaaacaattctttgttttgaatctcagggaattgagctaagttataacctgatggaaatactagaaaatccatcttatcgtgtaatttttgcatcaaccttggattcacttttttctctagcaaatcttgcttcgtacaaatatactgcaagaggttgtaatcattttcttttcttacaagctctaatatatttttactatcgtggctaagaccagttccaaccgcaaagcttggccttacttggtctgcttctacataaagtacctttttccctaaatgagctaactcatttgccatcgcaatacttaacgtgctttttcctacgttttcatttgtggcataaaaggcaaccattcttacttgccgatccatcttaaaaactcctttcttacttagattcgctcagatactgcgctacatactcttttacatttttagaaattggattggtcgaatgcttctctacatagtctaaaatgttcttttgatcagatatttgcgagaacccttctgctggttctaattctttccctgtttgttctattttttgtccgactgcaacaggaatcacatctccaagtgtttttgcacgatttaagtattgaagttgttcaggtgaaacagctagcgtatataatcgcgttactttgggcttttgttttccttcttgttcttcttttgattctttcttttctaatacaaatgcatcttctgtattgctatcttttgcggccgtaacacgtacacgttggaaaagaccaccaaacacaactttctcattgtcgccttctttcacaacctgtttgaaatacaagtcgacatacgtgttcggaatgatactattacctgaacttgtttccaaatcaacgagtaacgggaatgcaacttctccatcttttaaatttaaaatggcagagtcaggtaactcttctttctttactactttgtttttaaagagatagctattttctgtaatgggctgcccatcatttgtccacttacctactacttcttttttatttgcacgtaatacattggggggaatcgcatcaccaggtaatgttcgttccactagcatgtcttctttaatctctgtatgcgcaggtatatcctttgcggctacaacaatctttgttggttttactgcattttcgactgcgaaatgattgtacccatagatacccgctactgttgcagcagctaaacctaccgcagcaatctgcttcttttgaaacttagatggcttcaatgtttgtattcctccttatgtagcctttaaacgcaaaaaaaggacacacctatggcataatgcgccttaggtgtgtccttttagctaatctaaagtctatatgaaaatgttggatttggtttctttaatattacaatttcaatattatgatatatagagtttcatgtcaatcatttctaaaaaaaatattatttttaccatttcaaatctctgatcccaaaacttgaaaaaccttaaaaacgttgtcatatcaaggtttttaagctattaacccaactataaatatggtataattaatataacgtaactgaatatttcagggtggtcggttgctatcctttctctttcattttatggagaaaggaggtgatcgaatggatatacttttcacgatagcaattgagatactgaaagtaattgctagagaagtcgctgtattttttgcaaaacgagtaggtaaatacctatcaacgtcttggaagcaaatacaaaaaaagcgacgaaaaacgaaaagaaccacccacaatgccggcaagcgtttgaagggtgattctaagaaaaaataaactcttttttagcaaccatccaccttgcggtagcagttacataaggcgaagtgttaccagcacttcgtctttattagtttatgcaaaaactatctttataatacttctacacatattataacaccaactatagtacctgtcatgtatattcatccactatagctagttaaataaaacaaaatacttttagttcgaaatcaatttcgttcctgtttcaaaatactttgcgggagcataactcttcccattccgatcctgaaattcgcttccaatgtatagcgatacaatcattgcgacaacccccataataatcgcacgtctaacacgttgttttttctttttatccactctaatttcccctttctatgaaaaaaaggcacatcccattaagggatgtgcctttggtttatccattcagctactagtttatgatggatatattattgtgtcgattcatcaaattatactatattttatttttatttcccagtcttcatgtaataccaatcagtcaatttatgaagtagttcttctttccctacccagttccatcctactccacttcctccagggaatggatcatcaggaaatactcttctttttatgaaatcatcgtacgcaacacccttaatctctacttgctcagttaaacataaactcatttcattgatacctgctggagctgtttctacattaaaagtgtatacaccatcttttgtcttcaatggtgaataccatttttggccaccatcaataattttctcttgtccatcccaatataaagacttagttggtcttttactatcaaaaacatgtcctgttgcttcagataaatacatatttttaggtaggaacttcgctgtattatctttaagttctttcttctctaaatcttgagtagcctttaatccttcgtctgcaaatggatattgtgccttagcagcagcaaatacaccagggtaatttgcattccagtcatttttatattttccgtttacttcatacgaaaatccataaccagaatgtagcttagaaggagctaaattatcaatactccctgtcaaagtttcataatacatttccccagttatatcttcttttgatacacgttcacttactgtttctactacaccttttacactcgttacaccacacattgccttttcttttgaaggctcatagattgctgttttaataggattatttttgtatgtagtttcctcgatgtctatacggttaccagcagggttaatttccgcttgaattgttcctttacctttatgttgccagtcaagattcagggttttcttttctccctcagttaatcttaccttttgtaaagctacttgttgtccgttatgttttaacacaactactgtttcaggattcgtatatttttcttctaatacatctaactttttaattttattcttctctttttctaacttctgtcttgcattatctagcttacttgccgcactatctagtttattttcttcccaagagcagtctctatcataatagtgatcctttccctcggcatctacttcatgaattggattacggcgacaataacttagactagattgagcgctatctctctccgattcagagctatttacttcttgttgagacttattaatattgttgtttacctttgctctatattggtcacgttccggtttaaaattatcacgtgatacatctattcttgtttttatattctttccttctcttgctgtttctccttcaattcggtcagcagagaaatcgattttatatttaaaatcatcgtcatcacctggatctggattaggtgttacttctgtaccacagttaccatttatggtgaaatcaacagttttctcatttgattccctttgaacagcatcaatgactttaattttcgcagtatatcggccacacatttgtggctgccactttagttcttctgacttaaattgccctgcatcaccttcatttggtttttgattatctttttgcggagttgaacgcagataattttcttgatgatacacggtttcgccatcttttgtaatatctaacatccatttaactcggttccgttcacctgcagctgcttgatatggatttactgttgtgccatttggatcccgatcattatatcctttatttttacttacatattcgaatccgttaaatgtaaatttcacaggtacatctttttttccactcgtagccttaaaatcttttatttcaggtttacttgtgcgtacataccacaagttatacctatttacaccatttacactaccagcccctgcgtatcctccagaaagataggcaatatccctaatccaatagaaatgtccataagattcaaaggaatcttgatttgtaatcttatgtggaattaaatattttaaaacaaactgagagttaccccaatatttatccgtaattatgctatttgtaattctctccacttcagttaccattctatctcctactacaactgaagggttaatgtagccgtcatttgatatacgcacataaggctctgactggtcttcattatggataaggttttcccttggattcccccaattaaaagaaccattataaacagcaggaaaatgtatatcagctttatattcgaactcttttggcttatatctacttccagacctaagtagttttccctttaattgtaattcgtctgatgctaaaatcgtagtttcatttccattataaaatggtacatcactatttcctgcacttgctactgacggtaataacaaaattaaagaagtacaggttaataatatttttttctcagtttcataaaatccctcctttaaacataaaaaaggacacacctgtaccttgggaggtacgtaaggtgtgtcctttacgtaaataaatcaaatttatttatttattattatattacatatattaatatatcaaatgaagcatttaattgcaatgatattatacacgtacttgaacgtacatcatgtggtcagctgtagaatgccctacacggatcttatattttcctttttcatagttatttatttcttgagcatctacagtttcttgaatttctttatctagaactaaatcagaatttaacatcgtagtccactttttagctaattcaatagttgcttcgttattatctaagaaaataattttaaaatcattctcactagtagcattaacatagacttgtgccccaattgtaccttctggtaaatacatgtttttatcaattattctaatagttccatttaaatctgcatacttaaggttagtgccatatttagcattcacactcttgataagattttgcgcttctgtagaaatggatttttgagcaatcgggtttttcatagcgtttggattatacgtaacttcttctgtaactaaacctttatctaaacttgatggtaaatttgtatctggtttttcttcaggttttgtttcaggttttggatctggcttcacttctggtttttcttctggtttaggatctggcttcacttctggtttttcttctggttttgggtctggcttcacttctggtttttcttcaggttttggatctggcttcacttctggtttttcttctggttttgggtctggcttcacttctggtttttcttctggttttgggtctggcttcacttctggtttttcttctggttttggatctggtttcacttctggttttgtttctttttctactgcattaatagagttatataagaattggctatattgttcacgggttacatgtgtatatggtgaatacatattacctcctgtaccaatagtaacgccattttcttctaatgcgctaattgcttttaatgcccatgagtttttatcaatgtcagtaaacgatgttgtcttagtagctttgaatttgaaagcatttgtaagcacttgtgccatttgttcacgagttaaaatatcatctggaccatacttcccatcaccaaatccattgacaagtcctgctttagcaagtgctaagatttctttttcaaacaaatgtcctttaatatcagtaaacggatttttgaaactagcatttgcatctgctggtttaacgtacatatagatcatacgagcaacttgcccacgagttacattgtcaccaaagccaaagatattatttccgtacccttgcactactttacggtttgttaaatcataaattgctttcgtagaccagtgatttgctggaacatcattgaattttaatgagtctgtgttatcagcagctttcgctgtaaatgctcctgctcctaataaagatgttcccataattgttaatgctgttgctgtttttaaaaatttgtttgccattgtttgttcctccaaatatattagttttttcatagattcttttattgtacctaaattaaacataaaatccagatactttaacatataaattaattaattagcgtttttttataaccgccgttctatatggaaaatattaccatataaaaataggcttgtaaagtatttttatatatttatttttaaatatatttttctagcaaaaaaactatacttttcagcatagttttttatagtgaaaatcttagaatttttatcatttaaaatacacttgtcccattccatctttactcgcccatatcggagcctttataccatctaccccaatcagcttaaatatgaagaaatggtgttctgctttcaccttaaaagaaagggattgattatgatcgatgcgtccctttgtatactcatacttccatccatccatcttttcttctttcattcttttctctatcccagggattaaatccaccctttttccattgtaatcatattgaaatcctcccttattctctgcgatttcaaccatatcagaagcaaagttatgtgctttcactaactgtattccatacaaaacaccttcgggtaaaaggctgattaataataaagaaagggtaaggaatagagctgtagttactgtattttgcattcttaatgcacctactctttttctttattttacgtttccacctaattgtttttcttttgcatttgtatcgtagataataatacttcttgctttactctttattgtttcttttttctcatcaaattgcttaaaataactagcagcttccgcatcaccttcgacagcaatcattgctggtttctcctgtacatcatagacagtaaagttacgttttgaagcaggatctttaaaatccgcattactgttatacgctttttcaaactcttttttcgctttttctgcatcaatagctatttcttcttctgcacgaagagtacctatttttacagacttagccaaagctatctcgccacctctttctaaagacgatttattatcggtatgtgttgtatctccaatcaccatatcagttacaaaaaatagacaacctacaaataacagcaacatacttgctgcaacaataaacttttgcatccctcttcatcctcccttaactttcagacttccgaaatcgaaaaccacttaaaatggtacttttcttttggttcaacaattggtttggtagcaataactctgctatttccttcattattccttctagctctttataatagttccgactagatagtaacgtactactatttaattgagattcaaatacatcttctatctcatatggtggtaaagcagttaataccttatctccaaaacattcttctactacttcatgctttaaaagagtaggcgaaaacttattcccaatgattctcgttttctctaaagctaagtaagaaacgagctttctctctttttgtgtaagaggatgcactatctttagcaattgatgcagatctggttccgctacaaagaatatgtaatccgccatttcacaaatctcatggtataaatctttatcccaatcgttccctgcatcaataatagatataggtgcttcttggttggccaataaaaccttaataaaatggtcaaaatcctgctctgtctcgttttttagctcttgatccacaataggattctttacaatataatttattttgccttgcttccattttggaattgataatatatcagattccttctgtagcatctctttatatctctgcaacataaattcactacgatagttttctggtgcctcagtatatccctttaataacggatacgtataaccatcatcatatagattctctatataattcacatcaatctgtagttcatttaaatacgcagctaaaagatgtgaaacaaaagtagcaccacttctcctgttcatgctggccacaacaattgttcttcttggaatagcaataccgatttgtttttcatataccggctcaaaagccaatttatactgtttttttataacaggtgcttttggcatcttctctgaaacggacttacgcttttgtttgtttttaaatagtttgttggaattagagccaggttcactgtcgccgcctccctctaattcacttgatgcttcttcttcatcaacaggaacctcgggcaactttgtttgttgcggtgcctgacttgctcctacgatttccgctacatttttaatatccgattcctgtagtagctgcgggatgactttattatcaatatcaattttacgagagttaaaaatgtcatagatacctagataaatcagtttcgccaaaaactcatcatcattttcacgctctgtaaataccacaatacgaatatcccgattaaagcgaatatctcttaatttctgtaagataatcaattcacgtttctcttcatgtcccgcatcaatatttaatcgtttgtcattaatacatagaatattgggctgttccgtatctagaatttcatctaggtacttgatgtgcatcacatcactatcagctacttcaaatcctgcaccaataaaatcctcacgcaaatatgccgtatatacagtatcgctaatagctaaaacgattttttttgtcataaaatcccctctctatagaaaaacacttttaaagtaataccatattttcaaacggcacctgtgtttcatcttgtaatttttttagtaattcagtaagaagtgcttctatttcaaaacctcctaaattacgtggggcattatcaagaagactgtattttacacggatctcaaagcgatcttgtatttcttctaacggcatgttaccaaataaaatttgctcatacaggaatccttcttgaagatccttttgtatattcgttctttctttatatacaatcgtaacttgcgctaattcaacaaatggattatctaaagttagttttgcattccaatttaaattccagatttcacattgtttttctgcatgtacaacatttgcagtaatagatggagtgatagtaaataaacgatcaataggtacatttgtaaggaaggttcttttcccttcttctatctgcagtcccttctcttctctttcatgttcaagtgccatttctgcaccatataatgcaatttcactaaagatttgttccataagtggcttaattccttcataagtacgaacagcaaatacgctaaactcctgggtttcatctgttctaattaattcataaatattaaattccgcagcatttacaattgcaaaaggaatatcttgtacaaaattaggattagtaaatagctcatctggtattactgtttctggatgtcttagaaactctaatcctagttggtatcccttaagaaatgcatttttactggcagctgggaataaagtttcaaattttttaagatcgtttttaaatttcttttcttcaatttcattaccaaattctctatcttgtaaaatatttgcttgatcagcaattaataaaaaatagtaattaataagagattctatttttgtttcaaaatctgtattgtctttacaatacttttcaaatctttctttgctttcgttaataatttcattcattttttctcgtctccttataaagattatggtttttaaacaaaaaaagacacaccgatggcaggttatgtgccttcggtgtgtccgtttagctaaaaattaaatctattaatttatatatttctcttagttaattgttgttcacatacaagaatacctctatgaattttaaaagtcaatacttttatcgaatccgtgtgaacatatatttactcctttttctctatttttgctatgtatttaatctaaaaaattacaataaattaaatataaataatcacaagtagtttatataagattaacaagatatatatataacttaacacaattattaattataaagagatttaaaaaatacctctaaagtcttgtatcacatacgttccttgctattaagataaattccctatcgtaatatccccaatacaaacaagccatacatcatataaatcacaaaataagaagttaaataccatattactcagaattcacaagtctaaaataatattactaagatactcacaagtaatgaatcgtattataaacaaactgaatcgtattcaaacatagcataaacagcttatatacttgcgtaaaaatgctcgtagctacatgttcctaaacaaaaaagcatgttttcaaagtaaagaacatgccaaataacccttgctttttagtgattttttaacaagggctgtttctatatttttttaaaaatactacataaattctggataatcaccatgttgcctatgataatttgttcttatatcgctgctttctcctacagacaaacttttctccttaaaataaatccaggcatctctaaactgtacacgcatgaatgctggaatagagaatatttcttgctctttcatacaacattcaacttgatctaatgcataagtcattgcatatattaataattcattttgtttttgtattgttggtaaatagattgcgatatcaacaatttcttgtctaaatgcagtcattatattttctttatctttttttcttaacgcttgtcccatatgtttcaaacgagataccgcttcttttctacacttcgctataggtctatgtaattcttttttatcattttcaataacacaattcgaagaaaaaatgacattaaacttttcaataataacttgttgtacctgccttctaacacgtgtaatacgagactcacttggtttcttatctttaggatctactgcattaaatttaataataggctttacaatctctatgtattgtcgcactttctttgcattacgcttcaactttttctttagaaaagccatttttctcgtaatctcgaaatcttcaatcttgtgcttataatgttccataccaatttttctcgaaaatgtgttgattaattctaaaagaaacataattcctctattatctcgagcctttacaaggctacttagtatagttgtttgaattaaataaaatggaatacggaaatacgataacgatatatttatcatatctgtagtttctgcagcagtgtggttgtacaatgcataatctacaatttcataaacagtacgatttccaacaggtgtttctcttacgagcttacgctccaagcaaacttgaaatcctgtataaattgttgtgtagggaatcccacttttcttagcaagatccattatttgaaattcacgtggcagcattcctatatcattgcattcaaagtgcaataagatataagtcgctaatgctgaggatggtaattctttgcgttcattttctagttttacaatattaaaaagtccattaaaaaacttaaccccatgaactttaaagttctgctgagaaaaattcaaacgtgtactcattattctaaatgactccttccgaaaagagcacaaaaaaagacactgtaatatcacatatacaaaaatctacttaaatctagatgatttttgtatatttctagataaacaatgctcaaaatacgcaagaaaatcgcctttttcagttgcacaaatttataagatcaagtaaaattatcttataaatttatacaaatcaaaaaaggttttgaagctaaagtttaatctaggtaatattgtaagtataactttcaatcaataagagtttgttgggttcctagagattaacctcgatgaaatagttggcgctattttatcaagctgaaagatcttttttttttgcttttttatgtttatttttagttaattgcggcaaaactataactatagctaagttttgccgcattttaatgtaatcatatatgcattttttggtacttgcaagacgattttttataaaatcgtcttttttttatataacaatttcctgtttaatacagttatgctattgttctattttcgaaaaaaagaagttttctagttttatattcttaaatacagaaagacttctaaatatattgaaccatatgcggaatataatgaatgttataaagcggtttcaaaactagaaaatatacattccaacattaacaataacccttatataacaacgttttcaaccaatacttccaattctaatttatcataaattagcatagtaaacaaagaaaaaaacatagaaatgattcagtaaagcaaacagcaaaaacatggaattaataataaaacgtatgaattctaagtttataaatttaagaatttataaatcatatgccacattaacctcattttctctatttttgtacaatgaatacgatcttaaaatcaatacaaaaagattactagaataaaagttaaaaaaagatataaacactaactaaaataagttagatgtaaatctagaaaagatcgattctatattgataaaaaccctttattttaaagggttatataccaatatacatattctaattttgaataatagtatttatacagattcctaaacttagtaagaaaccttgtgtttaatcaaacacaaacaaaagagttatttacagctcaacaacatactatttaggtcatttggttcttattatatcaatttcgtatttattgttactcctatgaatcacttaataaatacgaaattcactctattattttctattagtagctaaatctcaaactattatttgcttcatttgaatatatcgctataaattttcttgagtttttgcaaatttatattactcaagaaaatttatttttagtgagcgagaatcggatattagaagaaaaacttgaaggaataatcagcgagttcgagctataaaactagaactaaaactagtataagtttgttctagttttatattaaaccttgataaatcaatgttatcccttgttttattctatctaaattttgttagataaccatatagaagatacagaaaagtagaacgaatattagaatgcacaatactatagataaaccatgttatctatagatataaaaatacttgatttttagtggaattatattaagattttctagtttttctatggtagagtaatctataggaagataatgcccattctatgtagaatataacatggaagagactttctaagttttttggttgtaaggaggtgttgtttctatgagtgagaacaaaacaaacgaagaacaaaatgaatatagaatgaaagaagtatctgaacttactgggctatcgaatgacttattaagagtatacgaggaagagtttaatctacaaataaatagaactaatggtgggcatcgtcgctacacggaagatgacattaataagtttatatctattaagaagaagatccaagaacaaaattggagctataagaaagttcgctcttggttaaatggtgacgagcttccagtagcattagaagaacaccaggttaaaacaaacctagagaaaaaagtagagtatcaaacagaattaattcaagatttgactgaaaagttggatcaaagtatcaaactacaagtggaaatggtaaaacaaatgcatgagctaaagaccgagaaacaagagcttgagcaaattgtggcacgtagaaatcaggatcttatagatactttaattcaagaaaaaagaaaagaacgtcaagaacgaattgagacagaatcaaaaaaatcattcttacaaaaaatatttggaaagtaaactttgaactagattctaagtttggtttatttaagtagcaagtctaaaaatggacttgctacttttttattttgataattttaaagatgttattttttaaatgcctatgaacctattcaattattaaatatcgacattagatttatataaatatagaagaattttaacaaagataaataacagtttaattttcagtttaactttaggtttaaatttagaaaggttttagaaagatatatgtagctctagtgtgacttaaggtttaaaaaatagtttaattcttagtttaacttttagtttacataccatttccattgtgatataaataggttaggtgaatttttccactctcaagaattaataaaatagatgggagttaaacaatgaatagggatcacttttatacgttaaacattgcagaaattgcggaaagaattggtaatgatgattgtgcctatcaagtattaatggcatttattaatcaaaatggtgaagcgcaaatgcttaataaaacggctgtggcagaaatgatacagctaagtaaacctactgtttttgcaaccgtaaatagtttctattgtgcaggatatattgatgaaactagagtaggaaggtccaagatttataccttatcggatttaggcatagaaatagtagaatgttttaaacaaaaagcaatagaaatgcgtaatttataagtataggggaggaattttatatgttattaaacagtaatgaactagaacatatctattcagctaaccatagtgtaaatgatattagtattcgatggggagttattggtgctggccaaaaaggtaataaagaggctgatttattcgctggttacaagttttcgaatggagctagttgctatccgacattagctgttaactttgcagagtcagatatgatgcatttacaaaatattattaaagaagatcgtattcattttgatggtttaaagggagctgcacgtacacctgctgttgtgactgacttatttgacccggaaattaatcctaatgctaatggataccttgataaattagcacaagagctaggtcgaaagtttacaaatgaagagggagaggtaattgtagaccaattcttaatctgtcttggagctggtggtggcgttggaacaggttggggttcacttgttttacaattaattcgtgagcagtttttcccttgcccagtatctatgcttatttccttaccatccggtgatccagatgaaattaacaatgcacttgtattactaagtgaaattgatgaatttatgagagagcaagacagattatttggaaattctgatctaaagccattagcaaatgtaatcatcaatgataatactaaaatgcaacggattattgaaacacaaaagggcacgaaagacctgaaaaatagatatttaaactggaaagaagttgcgaacgataatgtagtgagtacgttacatgaaataaacattatcccagagaactatggttctgataacgttacatatgacccatcggatttaataaaactattaagtattccaggacgtttcttaacaattggaaaagcgagaattgctaaatttgatttacattcacttggaaatagtattaagagaagtttagaagagggattcttctcagcagaacatcaatttgaaacagcaacaatgtatggtggtttcgttttaagaccttctaacgcagatttcttcaaagatgttaatacggaaaataagattcgtaataccttaggagagtataaaagattggatgaaatcgctggtaaatttggtgatccaatttgggataatgaatatgcggtttgctacactatatttgctggtatgacaatgcctaaacgctatatatctcttgcgcgagaaggaaaagagttggctgaaaaacaagagcaattaagagaagaagcacaacgtaaacaggacgaagaaaaagtagatatttcttttgcaacgaatcgtgtacaaaagaacacattcaatccttataataaaaaccaaggatttggcggggcatcaagattcagtggtggtaaaaactctgcatttaaacgtcagactagtgaagttactacaacacaaaatcaacaagaagaagagaatattattagcactcttaaaacttcaaatccatttaaaaaacgttaaaaaaagcgggtctaaacgacctgctttttttattaaaatcacaaccgattacaataaaaaactacaatgcacaaattagatatctattatattttctgcatgtttaacacagatttatataatgtgatagtttaaatagattgttaggccgtcctaacaattttatttcaatcctttatcctttaaaaaattgttcggttaaaacatgtcttccgtccgaacaattttaaaaggaccaaaagactatataaatcaatgtttctagcagatttttaggaagagaagtaatccaaacttcagcgtacgagttttagtatctagattcgtgcaaattcagtttaaacttttcataatttacaacaaaattttgctgtaataagatatatagaaatggttgttatttattgaaaataaattcgagttatggagttgtatataatgaaaagtaaaacgtataaatatacaagtaaaggcacacagaaatcttttcgtttaaaagaggctgatatatttgtattcacatttttatattacaaaaggcatcttactacacgacaaattactcagctttatagtgcatttgaaggtagggatttttctgaggatagtgtgtttacaaagcttaatcgtttttcaaaatacggtgctatcttaactaaaaaaattgataaaagagatgatagtataaccagacgtgcgacattctccttaaaagatagaatggtcgattaccttcaagaaataggacggattcctacaggatcttcaaaacgtagatattcttcttcaatctcgttacatacactctgttcacgagaaacgttagtacgtacacttttagaagtatcgaaaaaaaccaatacaaataagttattatgtgagctagatattcgctcatatcatcaaaaacaaaagaaaacagaaattgaagatgcaggtttactcttaattcccgatgaacacatttcatatcaagacaaaaatatttacattgaaatggatatgtgcaaagaaacgaatgctaccttaattgaaaaggtggggaagtatattgaatatgcacaaaaaaacaatgagaatataactgttgtttttgttatgtatgacaaatcgatgtttcttgcagaagatgctgacccaccatacgtacgtatgaaaaatctcttattttctatgcgagagtatcatgaacttttaatgaatcttccaaatctaaatatacacatctgctctttgaaagaagctggagatgttatttcagatatcattctaggaatagatgataatcaaaactttgaacaagatattcttcaacctttatctcaacgtacagtaggagatgctgactggcgctacgcatatgttgaaaaagtccaaacatttaaggaaacaatagatggcggtcttagacgaacgtatagaagagataaagatgctatgcaagatttcttctttatttttgggaatgaaaatgattaccgaatgattgctagattagacgacgttgtgttttcaagaagagaaggcgatgaaggggtgccacttgttgtgatttatccaaagcgcaacaagggtagagatatacttttaatggacacttatgacaacgtattactgctatccctccaaaatgaaggtgttactatcgacgcagatgaacagatcatggcacgtactgcaaataacatacatccgaaaagacgcaagcttgttgaattatattaatcattaattttttatatacttttatacaattttattgatttttattatttaaggtgatagaattacgtttgaactaaacacaaaaaactacaatcaaatcagaacatatgaaattaaggcaagcgacacacgctgtttttacagtgggtgtcgcttgcctttttttatatggagaaaggtggaaaattaaaatggatttacaatatgcaactactacaactgagggagtgctctctgctagagaagcgtttaaaaaccctgaactagtcctcaaacatatgacagaagagggcgcaacgtttagcgtttctctacaagatatccagattccaggaaaaccgaattactattggtatgatgtaattattgaaacggcatcgaataaaaaaatagaagtaaatattgcagtactttcccaagaagaatataaccaactctgcgaaagagatagtattgatttatatttaaaacaaactgaagacgcagcaaaattcttttttgaaaaatcaaaggaattattccaaccagaattcaataatagattcaagtttaaacataaagctcaattatatctgtaagcggtaggtgagcctatatgcagacatttaaacaacgattaccgttatttactacaattggcttgattagcggatttattctttcatttggatttggtttagtaaactacatcaagttactctactatgcatttgaaccaccgtcttatcctatagaaattacatatgtaccgcttattttaatgttcttctctttacttttaggagaatttagttttaggttttacagccgtattcctgctttgcatgtgaagaatgggaaattaataattttgattgcttctcatattgcagttgatattcaatttttatggtttgcaactgctccgattcatgcaaaggttattccgtatcttacagataaatcaaagcatgttaattttggggagtatgaggccataggtcatgttttaacagggaattttcacacactcactatgatttttgtctttttacctacagtttttatgatcttgtttacactttggtatagtggtcatattgttcgttacagagaagaaatattaaagtgggtacaaaaatacgaatataaaaatcacaagttacaaaaatggtttaatagccaagaagaacagatataccctgatgtggaaattggaccgcatattgagcataaagaaatggtccggattaaggggaaagatagaacgttaaatggtatcattattggtccaattggttctggtaaaacatcaagtttaattattcctatgataaatcaagatttacactggatggtgcgtttcataaataagttcgaaactgcgtataaaaagaacgattatgatacagaagaagtaaaaggaacatttttaaatggtgtcactgttattgaacccagtaatgatttatgtcaaaaggtatataaattagttcaagcacataagattcctgcaagctcggtttactacattgatccaaccaatcctgataccaaaaatataaacattctgcgtggaccggttgataaagtagcagaagttttcgcaatggttattcaaggtttgtctgaatctaacaatgcattctttgaacaagcgcagcgtaaccaccttaagcaacatatctacttattaaaactgcataatccacaaaaagatgtcaccttcgacgatttgatcgagatgtatgtgcgcccataagggtagatttagaattgattaaatagcactaatctaggttaactcacgaaagacctattaccaatagaattatgtatgaagatatgtatacaacgatagaggcattaatatcgctacaataatcgaaaaaaagtcttgataaaatggtgaaatggaatccgtttgcttcaataccgaagcaatacgaggaaatacatagaatgtttgaggaacaatataaagtacctaaaccttttttaacacaagatactatggaacgaatagaaagagcgttaatgcaatcttttcacgaggaagaagaaatacatatctcatactatcgtgatggaatggtgcaagacatgtacataaatgtattacatattgaaccgatgacgaaaactatatattgtacagatgcctttggtttgaatactaagtttaagtttgatgaattggtgaatataaattaaaagaagccgcccgacaggactgaagtgcaccccaattgttagacacagcctaacaattggggtgcacttcacatatataggtggcttttgtacgacaaaaaaaagagctctgctatacagcagagcaaaagaaaaatatataaccctataaaaataatacaaattattgatactttcaaaagacgaaatttaaatttccatcacaataatagctatgtttaagtatgaaacattctaccttcactatagctatgaatattcttattttagaattccatagtatccaaatagctctttgagagatacctcaataccgaacttcttcaaagaatcttttctttgttcaaagagaagttctaaaacttttttcttatctttgtctcttccataatgaatcaacctatgacagttcggacatatactaactatatttccaacaacatctaaactattttcaaaatcatgttgcattcttaacggtattagatgatgggcctccatataattttttcggctggcttccgatacaaatgtttcatgtgtgtcatctatttcacatttaaattctgcctgtttaatagcttgtttagcttttttcggatcacgaggccatacttccctaccagattccattttagttttttttcgattttccggtttctcttcttctgcaatctttactttactaaaatccgaatcaatattagcctgatacatatcttcctcttgctcatcctcagaaagaataaagctctcattcaacgctttaataatattatcaatagatttatattttgctaattttattgaatcaatatatgaatatataaatttaaaagattaaaataaaaataagtacacatgttttattaggaggtatatgtatgtccaacagcacttcatggctagatgaaattatagcaatattaaccgaactagatggagcaggaacactgaatcaaattaaaacaaaggttatggagcgtaataaaattgacttgaatagataccaacacgaacagtctatagctgcaagaattagaaagaccatttatcaggtaaactattataaaaacgttcaatggccgctactaaaactaaatcttctaaatgagcagttttaaggttgtttatttttaaaaacatcaaaaatgccaaatcccttatatcacaaaggatttggcatttttaagtatctagaacacgcgctaaatttaaggagaaattaacagacatgagtccggtataatgccgtgtccacacccaaggatcggttacataaaatagcgtatctaacctgggaagtctattggcctttttcccttatagtaacgctctcttctactaagaccttttctttctagggcctacaattaatttaatcgctgttctttcttcattattgatagaaatctcttgaaacgctggaacaaaagctaagtcaataccacttggagcgacgaaccctcttgcaatcgcaattgctttaatcgcttgatttatagctccagccccaatcgcttgaatttccacattaccacttgttcttagtactcctgctattgcacctgcgactgaatttgggcttgattttgaagatacctttaatatattttccatgtaagttgctccctctattatttaatctctctttcgttacaattttaaatattttagcgtatctttaattactattcacaccaaaaacaaacgatgcttcatatgtatattattctatattttctgactttttcctgctcagctacgcaaataaaaaataaactgaataacctaatataaatatagctaaatattataacttcaccaaatgataacatccatacagctaaaggtaatatttctgttttgtcagactaaataaatatagtaaagtgaaattttaatgagtgggggtttaattcatcccccacctaacttctttgctttcgctgaattttgagatgggagtcttactgctcggaaaatagcgggataaacgtttcctcgttacttcaatctatttagaaattccatttatttttctatcaaattataaaccttatcatcttcaaaaggtgttacaggtaatacccaaatactacacttcatcatttgaccactttatattccaaatctatttccttttatagtacaagcatacacgccaattgtgattcatcttcataaactactatgtggtttaaatttattaagaataggaggtaatattttgggttcatactatcattcttcaaactcgtataaaaaatgctcatgcaaatcttcttccagttcaaataaaaaatgttcatgtgaccattcacataaacgaagctgtcctgcatacggaactttttggcaaactgaatttataactgttccttttggcgatccttttccatttaatcacgttggacctttagcaggaggtgtttccttactaaatcctactactatacactttagacaagctggtgattatagagtttcgttcatttccagtattaatactactttaaatcctgtatttccacatatcccagtcataactatatttttaaataacaatccacttgctaatagtcaaggtgacttcgctattcaaatgaatacttcatcaaataacgaatgtcttcaactcgttggcgaaacaattgttacagtgcctgctaattcaactcttcaacttagaaataatagtggttttaatcgtcaaagtattgtaacttgtgacaatggtataaattcagttgaattaacagttacaaaactaagttaaaattatttcttcacattcagatgctatttcagcatctttttttattgaataacagttttttcaacttttattatctctccccacataaaaaagtgcagaattctttctaacacaagatttctgcactttttattatacttatttattcttccttatttctctacataaaccgacttaacaatcgtacgattatatggttttccttctttattcatcccttttatatccatcgtaacgttgtatactcccggttgttttatatctttcaaagcacctgtaaatgtattcgtattaacattttgtaattcattaaattcagagactaacttaccttctttattaacgactcttactgttatggaaagatcccctttcatttcaggtgctacaggtgattttttcagtttatactcaggtttatttattttaacttttgtaggcattcgaagaacaaatggtgcgtcatccttgtaatcgcttacaactaaatatgcatctttcgactgcttcgccatcattttgattttccattcgcctacttccaatttatcaaacttaaatgttctaattgtcgccctattaaagaaagattcgccttcaccagtagttatagcgctatctttatttgcatagatttttccttttggagataccatttgtacttctacatcagaagaagcagttagtacagaaacgattccttcagcctttttatcaacagaaatactttgctctatccactgattttgtggtaattcgcctcctaaaatattttgatttgaagttgtatttaattgttctagatcttcatttgaactagtgctggatgctactaaagctggtaatcccacatttgtcgtacgtaaatatggttcaattcgtgcaaaaacagctgatccttttcttatattgtcatgatcaaatctggaatctgtaaataaatgtgtaccgtacgatagcttcgcactccattcatttactagtccatcatttgaaccgtacgatgataaatataacccgcccatagataatgcagaaaatgttggcccccagctagttccagtagccgtatagtaacggtttaatttagctgctgggttgttatctattattgaacgaaactttgccatttcacctatttgtaacgaatacgtaccatcatctttttgacctaatatagaagcaagccaacctgcccaccaactatatgacaaatctgctaaatttgagccgtgatgcggtgtagcaagtgtaataacatttccaacaaatcgattcgcaccatattcaactaatgcggcttgtgtatcaataccacctttactatgcgctacaatattaacttttttaccgaaataattatatatttcttcaagtttttgtgctaacaattttccgttatcccactgactagccgaacctttccctgcagcatcatacaattgtataaacactgtttgataacctgcttttaaagcataatcatacatatcatttatatcatgatatactgtctttccataccaactatcagcattaccatttcttccttgtacaaagagaattggcggtttattctcatcataattagcaggtttttggcctaaaaaccattctccaggtgtgaatacttctgtatcaggaaacccctttccaagctcttttacaacttctgcctgtacatttgtgctaatcgttggagccatgataaaaaatacaattagtaaggccacacatcttctcatcagtcgcatattactccccctatttttttgaaagaaggtgttctttataatattttatattttcccttccttaataatagctaatcttttatttttagaaggttactagttgtataccctcttccttaactctcgttattctctttgtttctacctcttccttttgatagaatacgacaaaaaagtttctcaataattgttaacttcgctacacccagatattttttaaatcattattgtttatataaagcatacaaatcttgaaaaaattttagtgaaaaaacattttattactagttagttatttaaaaatataataaagatatgtactttcttttcattaaatacaaactaattttaaaggagcttgtattataagactttcctacgattaaaaattaaactgaaatttccgaatagaaaatcatatttccagaaacatatattatgataatttccgcacacttgaattaactttttagaagtactaacctatcggtgagcagaagaaaattctgtaaaaagaaaggagaatactttatgatgaccaaattacaaaaggagttttttaaacgcttagaaattcctgcaaaagaaataacacttgatgatttagatgaaattctcttaaaaatgggaatgatcctcccctatgaaaatcttgatattatggctggtactattaaaaatatctcaaaagataacttaatagaaaagttacttattcaaaaacgaggtggactttgttatgaattaaactccctattgtattattttttaattgattgtgggtttcaagtatacaaagtagccggtactgtttatgacctttacgataataaatggaaacccgatgatggtcatgtcattatcatattaagtcatgaggataaagattatgttgtggatgcaggttatgcatctcatctccctttacatccagtcccttttaacggagaagtcatctcctctcaaacaggagaatatcgaattcgtaagcgaaatactcgaaaaggtacgcatattttagaaatgagaaaaggagctaacggggaatctacaagtttcttacaatctgaaccttcaaacgaatggaaaataggctatgctttcactgtagatccaatagatgagaaaaaagtgaataagattcaaaaagtgattgtagagcataaagaatctccttttaataaaggagctatcacttgtaaattaactacttatggtcacatatcattaacaaataaaaattatacagaaacctttaaaggcaccaaaaataaacgaccaatagaatctaaagattatgctcgcattcttcgtgactcttttggaataacgcaagagaaatatgtaggaaaaacactagaaagaggctagttgactacaagtatttcataataaagcagattctatatttagaatctgctttattttatattttgttataaattaatttaattttgttgttaccctttaattttcaattatatactcatcatcatatttatcgtattgtagccctttccctatctttgactccgtaacttgatctcttaaaaacggtgcagcatccattttactagttgcaatttcaattccatattttttcgttaaatgagctaactctattaaaaaccactctcttcgcaatgtaactggaatatccaatgtttttcttttcatatataatagcacctcttttattttcatagcttaaaaatatcactggatgcacttattaaaactacctttcaccgctaacatccaatgaaacattatagtatatgcatgtccatttcaaacgtgctatcacaaatatgacatttaagtttacataattatattatgtaatagtaggaaaggaaggcatgtcccttcctcttctactatagatttaaattaagaacatcttggtacacctaaagctaaaaataaacctgctactcccgcagtaatcggtacttttaacgtaataacatcatctaccttcgttactaaaaagtaagcattaccttcttgtaatatacaagttaccaacaattgaaattccattcaaatctcctcctttcaattgatatactataatttatgaaatctctttcaaaaagtaataggaaatatatccatttttccttatatataaaataaatgtttatgagtctattaaaaatattaattttctaaatttatacaaaacgtgtaatatccaataaattcctatataatcaataagaagaatcttacaaatagaggtatgaaaatgtcgattttaagtaatattggtgcagctttattttttattgcttttattcttttaatcttatgtatcatttcattctttaagaaaaatggaaaagcaaaacaatatggacgtcctaccgttattctttttatgatttctattatattaataacggccggtacaacaaaatcggaacaccccgtcgtcgagtttttttctactttaagtttcattctatttatattcttccttgttctagcaatcttatctgttattaagaaaacaggtgtagcgaaaaaacaatttattattacagctgtattatttgtcatttttgttgtgttattaggtatttcagctccttcttctgaaaaaacgacagcaactagtacaaaagttgcctctaataatgaagagccaaaagatagcgaacagaaaaaagagctagaaaagaaagaggcggacgaaaaaactcaaaagcaagaagatgagaagcgtctagccgaagaacaagctcgtaagcaagaggatgaaaaacgtcaggctgatgaacaagctcgtaaacaacaagaagaacaaaaacgtcaggctgatgaacaagctcgtaaacaacaagaagaacaaaaacgtcaggctgatgaacaagctcgtaaacaacaagaagaacaaaaacgtcaggctgatgaacaagctcgtaaacaacaagaagaacaaaaacgtcaggctgatgaacaagctcgtaaacaacaagaagaacaaaaagcacagcaagctcaaacacaaccagctaatggtaatactgatagtgcatactacaaaaattgtgctgcagttagagcagctgggaaagctcctttacataaagggcaaccaggttatagctctcatcttgatcgtgatggcgatggaattgcatgtgaaaaatagtaataaaaaagaagcttttactaagcttcttttttattaacgtaaaatattaccacttattactttcccccttattttaataacattcttcttattattctcaaaaacgacacagaataagtgatttcaatcactacatagattttaatttatcgctattcttaattcagatattacattaaaattttatggaggcattcatatggaacatacatttactgaaacttcaattgttggtgagattgttacacaatttccgaaagctagtgatctttttaaatcatatagaatagatttttgttgtggcggtaataagccacttattgatgcaattcatgaaagaaatttatcagctactgaagtgcttacagagttaaatacgctttatcataatacgaaacgattaaatgaatcggaaattgattggaaaaatgcttcttatcgtgaattgattgattatgtcataaataagcatcaccgctatttaaatgaagaattaccacagttaagtccatatgtgacaaaagtattacgtgttcatggggcaagtcagcctcattttgctcaaattcatgagctatttcatgaacttagaatggaattagaacagcatttaattaaagaagaaatggaagattttccattaattttagaatttgaacaaaatccaactaatgaaaactatgctaagttacgtaaagtagtaaatgaactagaaaatgagcacaatcatgctggaaatattataaaagaacttcgtaaagtgacaaatgactttactcctccagaaggtgcttgcggtacttatcgacttgtttaccaacgcctcgaagcgctagagtctgatttatttgagcatattcatttagaaaataatattttatttccgcgtgccattacgaaagcataaatcaagtgcaggacatgagtgtaaatacttatgtcctgctttttcgtttcgcgaaaaatattcacatccccttcacataaaaccgaattttaacaatttgtgaatcattataaagatgtgataaatatcacatctcccccttatttgattttctataataaaaatataatcctttgttcaatatttcacataaaaaggggaaacgaaaatgaaaaaacgtttagttatgatcggaaatggtatggctggcattcgctgtatggaagaaatcttaaaacatgatagtgattcatatgagattactatttttggagatgaaccgcatccaaactacaaccgcattatgctctctcatgttttacaaggcaaaacaaatatacaagatatcattatgaatgaatacagttggtatgaagaaaacgaaataactttgtatacgaatgaaagagttcaaagtattaaccgagaagaaaaaattattattacagaaaagaagcatactcttacatacgacaagctcattatcgcaacaggttctagtgcttttattttacctgttgaaggttccgcactttctggtgtaacagggtttcgaactattgaagatacacaatttatgatagataccgctaaagaaaagaaaaaggccgttgtcattggtggcgggttactcggtttagaagccgcaagaggtctaattgatttaggaatggacgtacatgttgttcatttaatgcctagcttaatggagcaacaactagatacgaaagcagctgctcttctgcgtgaagatttagaagcacaaggcatgaagtttttaatggaaaagaaaactgtaaaaattcttggtacagaccatgttgagggcattcaatttgaagacggtgaagttgtagattgtgatttaatcgtaatggctgtcggaatacggccaaatacgcaaatagcaaaagatgctggtctaattgtaaatcgcggtattgtagtcaatgactatatgctaacaaatgatgagtccatttatgcagttggagaatgtgcagagcatgacggtatcgcatatggacttgttgctcctctttatgaacaaggtgcgatattagcaaaacatataacaaatttacaaactgatggatattcgggcagtatcgtcggtacacacttaaaagttgctggttgtgatttattctctgctggccaaatttatgaagatgatcaaacgaaagcaatatccatctttaatgaatgtaaacgttcctataaaaaaatattaattcgtgataataaagtcgtcggtatcgttttatacggtgatacagctgacggtacccgcctctttagcatgttaaagaaagaagaagatatacaagaatatacaccagcttccattcttcacaaagctggtgaagaatgtgaacttgacgttgctactatgagtgcggatgacacaatttgcggatgtaatggtgttacgaaaggcacaatcgttcacgccattttagaacaggagttaaagacttttgaagaagttaaagcctgtacgaaagccgcagggtcttgtggtaaatgtcgtccgcttgtagaacaagttttatctcatacacttggagatgcttttgatgcttctgcacagtctaccggtatgtgcggatgtacacctttatcacgtgatgaagtcgtagcggccattcatgagaaaggtttaaaatctccaaaagaagtacgaaacgttcttggttttgtacatgaagatggatgttcgaaatgtcgtcctgctttaaactactatttacgtatggcgattccagaagaatatgaagatgataaatcatcccgtttcgtgaatgaaagaatgaatggtaacatccagcacgatggtaccttctctgttattccacgtatgtacggaggcgttacaacagcagatgatttaatgaaaattgctgaagttgcgaaaaagtacgatgttccacttgtgaaaattacaggtgcgagccgaattggcttatacggtgttaagaaacaagatttacctaacgtatgggctgaattaaatatggcttctggatatgcgtattcaaaatctcttcgtaatgtaaaatcatgtgttggctctcgtttctgccgtttcggtacgaaagattcattaggacttggtatgttgcttgaacaatcattagaaatggtagatacacctcataaaataaagatgggtgtaacgggctgtccgcgtaactgtgcggaagtactgacgaaagattttggcgttgtttgtgtcgaaaatggataccaactttatattggcggaaatggtggtacggaagtacgcgaagctgattttgtaatgattgtccctactgaagatgatgtccttcgcatcgctacagcttacatgcaatattatcgtgaaactggtatttatggagagcgtactgcctactggacagaacgattaggcttcgatcacataaaggaaatactgcaagatgcaaatatggtcactaagttaaatgaacgtttccaaaaagctcgtggcacatataaagaagcatggggacaagcactagaaacgaaatcattaaaagcgatgtatgaagtagaaactgtgaaataaggagctgtgatctatatgatacaaacgaaagaaaaaataaaagttatgcgtgcagaagaccttcctattcaaatcggtaaagaggtacaaatgaaaggtatgtctatcgccctattccgcctttcaaatggcgatattcgagctgtagaaaatcgttgttctcataaaaacgggccattagcggaaggtattgtatctggagaattcgtcttttgtccactacataattggaaaatttcactactaacaggtgaagttcaaaaacctgatgatggttgtattcaaacgtatgaagtagaagttattgacggggatatttatatatacatgtaatttacaaaaggaagcctcccctggcttccttttaaataaaaatagacgaggtgcgaatatgaacggatatgtatatttagttggtgcaggaccaggtgatgaagggcttattacaaaaaaagcgatggagtgcttaaatcgtgcagatatcgtcttatatgaccgcttattaaacccttcctttcttaattatacaaaagaaacatgtgaacttatttattgcggaaaaatgccaaagaatcatactatgcgtcaagaaatgattaacgcacacctccttcaatttgcgaaagaaggaaaaatcgtagtccgcttaaaaggcggagatccatctatttttggccgtgttggtgaagaagcagaaactttagcatcagcaaatattccatatgaaattgtaccaggtattacatctagcatcgccgctagtatctatgcaggtattcccctcacccaccgtgactacagtaatagcgtcactttattaaccggacatgcaaaaggtcctttaaccgaccatggaaaatataattcatctcacaatagcgacacaattgcctactacatgggtatagaaaacttacctacaatttgtgaaaacttactacaagcagaaaaaaaagaagatacgccagtagcagtcattgaatggggtacaactggtaaacagcgcgttgtcacagggacactgtctaccattgtttctattgtcaaaaacgaaaatatttctaatccttctatgacaattattggtgatgtcgtttccttacgggatcagatcgcttggaaagaacgtaaaccattacacgagaaaaaagttttatttgcatctgcaacgaataaaacaagttcaatgaagcaaaagttacaagaagccggtgcagaaatatatcaaattcctactttcaaaaaggtagaatacacattaacacttgaacaaatcaatgaaatttttaacgttaatcgtcttgttttttgttcagctgaaagtgtagaaatattgatgcaatcatgtagtaaacaccaaaaagatattcgttctttacaagcgcaactacaacatatgaacgttgccactcaagaaaaacttatgcaatatgggctactaagtaaacaagcagagttctcttccaatacaacagtttatttaggacgaaacattaaccgaattgctgttattcaagaaaaaattggtgctggttcctatatgatgactcatgagtacacaattgatcatcgcttcgatgaaattcattcacgtatgctttctgaattctcatgggatagcattgtatttgaaggtcgtgcttctattgatacgtttctagcagaaataaaacgccttggctttatcaatattcttactctcccattctcgtataccgacgttccaactttatactatgcaaataaagttgggtttcataacgtagatcatcaattacaagaaactcttatgaagaaagacatggtgagacaatgaaaggaattgtatatgttggacatgggagccggctacaagaaggtaatgaacaattcattcaatttattcaatctgttatgaaagagcgaaacgaaagaattcaaaaaatagcttttctagaactaacgacacctactatttcggatgcagttacagaaacgataatagagggagtaactgaaataatgattgtacctgttttattatttgcagcagctcactacaaacgtgatgttccttttgaaatagaacaactacaaaagaaatatccacaaataacattttcagttgtacctccttttagtacacatccacatatggtggaacttgtagtgaaaagaatacgtgaagctatgccaatgcaaaatagtagtattttactcgtaggacgaggcagtagtgatacacaaccgatacatgagttacaacaaatcggagcagccatcgaacgaaaacttggtatgccagtatcctgttcctttttaacgaaaggaactccctcttttgctgttgagctcaaggatataacatcgactgcgtcccatgtatatgtcatgccataccttctctttaccggattattacttcaaaaaattgaattgcatacaaaaaaatacaatcatgttacgacttgtaactgtcttcagtttgatacatatatgaaactaacattgttagaacgaatggaggaatgcatatatgtataacatgtaccctcttatgtttaatctacaaaataaagtggttgttatcattggtggaggtaaaattgcatatcgaaaagcgtctggattaaaagatacaggcgctttcgtcactgttgtcagcccagaaatttgcgaggaaatgaaggaactttcttatattacttggaagcaaaaagcttttagtaatgatgatattaaagatgctcaccttatttatgcagctacaaatcaacacgctgtaaatatgatggtcaaacaggccgctcatgatttccagtgggttaacgttgtaagtgatggtacagaatcatcttttcacacacctggcgttataagaaataatgaatatgttgtcactatttcaacttctggtaaagatccatcatttacgaagcgtttgaagcaagaactaacatctatattgcctaaacttataaaaaagatttctcgtacacataaattgtaatctatttcttagttaaaatagtaattacctttggacaaacgttttttaggggacgtttgttctttttgttgtagttccgttcttttatttcacaagcaatctatgaagaaaataaatggtgtttgcaacttgtaaacaaataaatttcatgacaagtgtaacattacgagcaactctttctattcagtttttatattggatattcattcaaccaaattagcgcttgttcataatcatcaaaaaactccacggattcttttgtattggattgttgcaaatacttcagtatctctccttcttcaagaagaaatgcaattgccttactatgattcaaaatggtttcattgaagaacttatctttccatactttttgaacagaaaaatgatttggggtatacccttttctatccaccaacaatttgtatttccgaccctcagaaataaattgctgacaaacctgctcaaaatcattaaaccattcatacacatcctctgtattaatctggccaattagatgggtaacaatcaaatctcctgaaactattgtgctgatattctgtttactcaacttttaatcatctcccttagtggcaattatgcataaaattcttacttgacactcccaccccatcgctatcaccctaagctcatataactttaattataagcgagattgtgtcttttttcgcaagtctatatgtaaatactttaaagatttccttaactaatctgccctttaattgaataacttttgacatcttcattttaaaagcacattcttatagaaaataagcgtttattgagagatcaataaaaacatgttgaagcctattactaaaagaaccatcccaaaatactttgggatggttctttttccttattaatgattctttaacatcactaacagcttttcttgactatacatccacactgtaatgattaaacaagcaagtgcgacttctgataatgccataaatccaattgcataatggcctgttagttggaatagtaatgttaaaattaggggcgggaagaaccctcctagtccacctaaagctgaaacgagtccatttacaatacctgcttgttctgagaagtacattggaacgagtttaaagattgtaccattaccaatgcctgcacaaaatgcgactagtaagcaaccaaatgtatacacgttcatactaggcatgaatgataaaataatacctgaaagtgttaaaccgataaatacgaagattaatattttaaatggattaaacttatcgccgagccaaccaccaatcggacgcataattgttgcgagtacgatgaatcctgcagttcgcataccagcatctactttctctaatccgaagtgagatactaaaaagtttggtaagtatactgtaaatgcgacaaatgatccgaatgttaaaaagtaaaagatacataaaaaccaaagtttctcatttttatatacaccttttatttgttccattaatggtgtattcacctttttctccttacgatcacctaataaaaagttcataagtgcaaatgctgcaagtaaaactaaataacattgtactgtcgttctccagccaactgaagttgcgataacaggcgctaaaaatgaagtaattgctgttccggcgttaccgacaccgtaaataccatttacaaaaccatgactctctttcggaaagtattttggtaaagaagttactcctacagagaatacagcaccaccgattcctacaaataatccaccaataattaaatccatcatagaattggcaacactaatataaaagacaggaagtaataatagaataaaactaataaagaataattttcttgctccgaaacgatttgtccaataaccaattggaatgcgaagaacagaacctaaaataacgggtactgctgtgaccatagaaatttgccccgcagttaatgggatatccactttaatataaggcattaatgatgataaaatgacccataccataaaacctataattagattagaagtttgtaaacttaattgaaaattaggacttttcatcctgttccctcctatgtatgcatagttatattcattctctccagcctaatcacgtcgtaacatgattaggtcgaaaagaatcaaccaccacttactggcggaatcatcgccacagtatcaccagtttgaatgacgtcattctcatttgcatactcttcatttatagctaccatgatttcatttgaaatcgctacgttgtatttcttaatgagtaccttctttagttcagcaactgtaatattttcacaatcgatttgtaatgctggcttacttacttcttcttgtaaatgtgcaaataatagtacttcaatcatattctcatctcctcttcaggttcaccatcttcccaaaattctttcttccaaattggaacgatttgttttatacgctccataatatattcgttcgcctcatatgcagctttccggtgtggtgtagaaacagcgacgacaacagcaagatcagaaatttgtaatgtaccaatgcgatgtgtaatggcgacaaatgtcccaggccacctctctcctaattcagtaccaattctctcaagttgtttttctgccattgttttatatgctacatactctaaatgtagcgtacgacgccctttcgtaaattctctaacagtaccaacgaaagtagtaactgcgccacactcacgacgaattactttgtttgtaacttcctcaattgaaataggtgtatcaattacttcataatacgtttgtatcattttgcacctcttatctttgtataagttagtaatctatttttctattatttgtatgatcgaagtggttcttcccacggccactcacttccagcgtttgattctaataacagtacggaaacagttattcctgcttcaaatcctctcgttcctcctggcaggacgataaatgcgttcgcctctgcaagtgaagaaattgcactagatttatctaaaccaactggtatagcttgcaattgactatctacaaattccactctccctcttacaaaacgagtaaacggatttgctttcgaaaagtctttttgtaaaattgcttctgcacgataaatgtgtggatctttcctatgcaaatatgttccaatgactggtcgaacatataactcacatccgacataacaagcagaaggattaccagataaaccaaatagtagttttccttctacctcagctacagttgtcacacttcctggtcgcatcgctattttgttaaaaagtacattagcttgtaacctcttatgaatagcaggtaaatagtcataatctcctaccgaaacgccaccagttgtaattaaaatatcgacttctttcatcgctttttttacagtgttataacacgtctctaaatcgtcagcgaattgcccataatactgtacaactccgccggctcgttcaatttgagcagcaatcatataagagttactatttcgaatcttccctagctttaattgttcatgtacttcaagcagttcgcttcctgttgttacaattccaataaccggctgttttataacatgtacggaactataaccaaacgtagcaagaagcgctgctactccaggattaataacagtcccttttttcacaaggatgctattttggtttacatcttctcctttaaaagaaatgttatcgctagaagagaaagagcgttttaataccatataaatcttttcattttcttcaaatccttccgttagctctaacataacaaccacattacacccttccggaattgcggcacctgtcataatacggacagcttgaaattctttcacttcttctgtaaaaacaaagcctgctccaatttcgccaattacttcaaattgaatggggttactactactcgcttcttttgtatcttccgctcgaatcgcaaacccgtcgtacggagagcgatcaaaatgcggaacatcatgatctgcaataacatcttctccaagtgttctaccgtagctttctataagagaaaccttttccatttcaccttggtaggcatatttcattacacgagcaactgcttctgctactggaattggtatacgtttatctaacattctttttcacctcattttaataaggaaaaaacgatttttctgttcatcctatatatttggcgtataatcgttttgctattttcacatcatttgtcccatgaataaatgccctaccgtctataaataaaacaaaacgatattcatcaactagaaatgatagtaagtaaggcgtttttttgacatgtacacttttttgtaatcgtttttgaatttcggttaaattaagatttctctttattcctgaacggatttgaactgtattccgtccgcataacacttccgttttcatttgcgcttcaaatattaagcttggatacgttcgtgatttcccacaagaaggacatgtacttttcttctgtctatttacttttaatgagagatattgattgttccaaatatcaaatgacaacatcgtccctcttaatgattcataatcacccaccaatattttcatcgcctctgtaacttggtgagcaacgaccatttgtacagctggctgaatgattccggctgtatcgcatgttgcaccgcccataggatgatccattagacagcgaaaacatggtgttttcccaggaagaattgtatacgttacaccgtaactcccaatacatccgccatatatccaaggtatattttctttttgtgaaatgtcatttataagtagacgcgtatcgaaattgtcagtcgcatctaatatgagatccacatcttttgttaactcttctatttctcgcattgtgacatctgttacaactggtacaatttccacttcagaattaatctttcttacatgttctgctgctgcaattgcttttggtttacactgctgcgcatcttcttctgtatataactgctgccgctgtaaattactccattcgacgtagtcacgatcagcaattgtcaatttcccaattcccatcctagcaagtgcttctgcattcgcagctcctagcgcacccgcaccgattaggagcacatgcttttctcttatttttctttgtcccatttcaccaattccagaaaacaacacttgtcttgaataacgctcttgcataagaaatcctcctttcactatccaccaatgtaagacatttcaacttttggacgtttacttgtattctcaactgttctttcatctgaatatcgatctgttctatatcgccatgtatcatttaaaatttttaatagtgatgcatcagaaatattttctcgaagaagcgttcgcaaatccgttcctttcgctccaaataggcatgtgaaaaacttgccgtctgccgaaatacgagctctcgtacaagaaaaacaaaatgactcagaaacagaagtaataaatccaacttctgcattactccctacatatcgatacaatttcgcaacctctccaaaataacgaggctgagcgggctcaattggatatacacgattaattttctctattaattgttccttcgtaatgacttcttcaaaattccatccgtttgtactgcctacatccataaactcaatgaaacggagctgaatttctttttctttaaaataacgagccatatgaagaatttgactatcattcatccctttttttacgaccatatttacctttacttctaatccagcagcatttgctgcttctattcctttcagtacaggttttgtacttacatttcttccgttaatttttttgaagacatggtcctctatcgcatctaaactaatatttacacgttttaatcccgcgtcttttagcgccttagcttgttttgctaaatgaattccgtttgttgtgagtccaatatcttttaagccttctagatttgtaagtcttgcaattaacttcggtaagtctttacgcaataaaggttcaccgccagtaagcctaattttattaactcccatacttataaataatctcgctaacctttctatttcattaaatgttaataaacactcttcctgtaaaaaagcataatcaggtccgaacacttcagcaggcatacaatatgtgcacctaaaattacaacgatcaataactgaaatgcgtaaatcttgaagtggccgctttaaagaatctttcatattctcgtgcatctctatcccttcttttctgctgcaatccttagtaagctttcatttttttatttgccttcattataaaaaagaagctacatattcaatgtgacttttctcacatcactttccccattcaaaaaattttcacaaatccgttcgcattttgttcacatctttagccactcctccttacggtcattgaaatttcaatttatttttaaatagctcttgcattttcatcatacttacactcaaaataggaaatgtattgcttataagaagaaaggtgatcactgtggcaaacagtatgacattatctcaagatttaaaagaattacttgcatctgttgaatataaaatgcagataaaaaaaggtagttttatttttcaagaaggtatggaggcaacagaactctatatcattcactcagggaaagtacaaattagtaaacttagtgctgacggacaagaattaacacttcgaatttgttcggaatatgacattattggagaattaacattgttcacggataatgcaaaatatttattaaactcaaaatgtcttgaagatgttgaagtaggtgtaataaaacgtgaagcgttagaaaaagcattactccaaaaacccgctcttgtatttgaatttatgaaatggattagtgaacatttaagaagaatgcaaacgaagttccgagatttagtattacacggcaaaaaaggtgccctgtactctactcttatacgaatgacaaatagttacggtgtattaaaagaaaatggtattctcatcgatttaccattaacgaatcaagaactcgctaatttctgtgcaacttcacgtgaaagtgtaaatcgaatgttaaatgaattaaaaaagcaaggtacaatttcaattcataaaggaaagattacaatccacgatttacaatttttaaaatgtgaaattgcttgtgaagattgctctgcttctgtttgtagcattgattagcatcttatttagatgctaatcttttttcaatttaaactacttattaacgtttattgcctatgtaaacaaaaacgaggccttccatattagacctcgtttcgttttaaccattagctcctatccgtttacagcagtattattttttcaactcattaggaatacgtcttctgtaaatcacataactacggcttacatatttaattggggcactaaatacatgtacaagtcttgtaaatggccacactgcgaaaagccccatccctgcgagaatgtgaattttaaaccatattggtacttccatcatatattcaactttcggttggaaaataaagagacttcggaaccaagggccaatcgttgtacgataatcaaatccttttgaatcgatatttaaaaatgttgaagaaagtcctgctagcattacgataagtaataaaataagcgcaatataatctccctttgtactcgttgcaatgatacgttttacagttacgcggcggtacgttaatataattaaaccgataatagaagcaacacctgccggaagcccgaaactaattgctactacatggtacacatgctcagaaatacctactgaacggtatacagcttctggaattaaaatccccataacatgaccgccaattacgaacatgatcccaaagtgaaataatagacttccgagtcggagcattttcttttctaatagttcactagattttgatgtccatccaaattgatcatagttgtatctaaaaatatgtccaccgataaagattgcaaaaatgatatagggaaacaatacccaaagaaattgatccatcattttgacaacgctcctttctaatttgtctgtacaccccatgtttcgatagcgagtagcacagacgcaagaattggttcatacatactacccgcttcttttaattgaacgtgtaatgcttgtatattttccgtgtatttactcataattggttcactgtcttgctcatttgcatttgcaaaaaactcaagtaaaagtggtaaatagtcaggtagttctttatctgttacgctaaaacctgattttttataatgttgttttaactctagtaattcaatacctctttctctttgttcaccagtgttcatataagtaagatacatatttgttttcttaccaaaatcaaatgtatatacgtaactatcaatgagttgatcattcgttttatctagcacttgctttataaaggctgtaagtgaagctttaacgtcttcctgttctattgttttaacctcttcttgcaattcagttaaagcttctctccaccctagttcaggataggagagaagaaaagaagaacaagaaaaagctgtttgtaaactttgtctcataattttctgccccctttatttaagaaattgtcatacaagagcctggaccacctgtgaatgataaaccacagcttccttgttcgctatataaatctgccacttgttcacggtgagatgtcgggataacgaagcgatctttatatttcgcgatggcaagaagacgatacatatcttctacatcctgtttcgttaaaccaagttcttttaatacagcttcatttggctctttattaatttgcagtgctctcatatgtgttcgcataacagccatttttttcaatgtaagacgaatgtgtgattcatcccctgcagtgagtaaattcgctaaatattgaattggaatacgcatattatcaattgcagggaaaacctcttctgcttgccagttactacctttcccttccaccatgttcataattgggctaagcggagggatataccaaaccatcggcattgtacgatactccgggtgaagaggcagagcaattttccaatcgataatcattttatagataggtgactgttgtgctgctttaatccattcttcaggaatgccttgttttttcgcttcagctgctatttctggatcatttggatctaggaaaacagtaagctgagattcatataaatctttttcgtcttcaacagaagctgcttcttttactttgtcagcgtcatatagcattactccaatatatctgatacgtcctacacatgtttctgaacaaattgttggcataccagcttcaatacgtgggaagcacattgtacatttttcagctttattcgtttgccagttaaaatacacttttttatatggacaagatgatacgcagaatctccatgcgcgacatgcattttgatctacaagaacaattccatcttcttcacgcttatacatcgcaccagatggacaagatgatacgcaagatggattcatacaatgttcacatatgcgtggtaaatacatcataaagacgttttcaaaatctgttttaatttcttcttccattttctttacgtttggatcttgcaatccagttatatgtccgcctgctaagtcatcttcccagtttggaccccattcaattttgtcgataaattcgcctgtaattgctgatttcggacgagcaactggctgatgcttacgctgcggactatttgttaacgtttcataatcatagttccaaggttcaaagtaatcatcaatcgttggttgatctggattgtagaaaatattcataagacgtttcattttcgaaccggattttagctgaatttcaccatttttcaattcccagccgcctttatatttctcctgatcttcccattgtttcggataaccaatacctggtttcgtttctacgttattgaaatacatatattcagcacctggacgatttgtccaggtgtttttgcatgttacgctacaagtatgacagccgatgcatttatctaggttcattaccattccgacttgtgctttaatcttcaagccaatctacctccttcagtttgcgaattacaacgtttaagtcgcgctggttcccagttggaccataatagttaaatccataacttaattgaccatatccaccaatcatatgtgtcggttttacgtgaattcgagttggactattatgcgttcccccgcgattacttgttaatttcgtaccaggtacgttaatgtgacgatcttgcgcatgatgcataaatgccattcctctcggtatacggtgcgttacaacagcacgcgctacaacaacaccgttacgattaaagcactcaatccaatcattatctgcaacacccgcttcagcagcgtcctctttattcatccaaacagttggaccacctctaaatagcgttaacatcggtaatgaatcgaagtacatactatgaatcgaccacttattatgcggtgttaaatagtttaatgtaatttctttcccttctacttcaggtcgtgatttacggaacggtttatgttgcagaattggtttaaatgttgccatcgtttcaccaaattctttcatcatgtcatggtctaagtagaaagattgtcgaccagttatcgttctccaaggaatgagacgttccacatttgttgtaaacggtgagtaacgtcgtccacctttttctgaacctgtaaaggccggagaagtaattactgttttcggttgtgctgtaatttgttcgaatgtaaagcattcttcttcacgttcttctgctaaatcacgtagttttaaatctgtttgtttttcaagtgcttcccatgcttttactgccatatgaccgtttgttgtagaagatagtgttaataccgcttcagcagcattgattgcttctttgatgtctggacaacctttcgcgatagaatccgttcgaacgactcctaatttgctctttaattgctcatactctttttctgctgaccaagagatccctttcgtaccaatcggttgttttccggcatttggtccaagcgcagtcattttgtcataaatcgttttataatccctttcaacaacgtgaatttgtggcatcgtcttacccgggattggttcacattcacctttactccaatctttaatcttgccaagtggttgcgctaattcttgcggtgtatcatgaagaagtggtgttgcaacaacttctttcattggttcaagatcaattttcttcgctaaatctgacacagctttagaaagtgaagtgaaaatatcccagtcagagcgcgcttcccacggtgaaccgattgccggattaaatggatgtacaaatggatgcatatctgtactgcttaaatcgtgtttttcgtaccaagttgaagcaggtaagacgatatcagaatacagtgctgttccagccatacggaaatctaaattaatgagtaaatcaagctttccttctggcgcttcttcatgccactttatttcttctggtcgtaatgaatcactgtcgtcattcattaacccgtttgttgtacctaataaatgttttaagaaatattcatgtcctttaccagaactcgaaattaaattcgcacgccatacgaataagtttcgcgggaagttgtttgtgttatctggatcttcaatcgcaaacttcagttctttttcttttaatttttgtgcaacatattttccgatttcttcttgcgttgttgcaccagcagcaacagcctctttatataattcaattccatttttctcgaatgttggataagaaggtaaccagccaagtcgtgcagctaatacgttgtaatcaccgtgatgttgataacgagagttaccttcaactggtgacgctaaatgtccaacaggtgtatcttcataacgccattgatctgttacgaaatagaagaaggatgtaccgttttgtaatttcggtggaccttgccaatcttttgccatcgcgattgtttgccatccttctgctggtcttaatttttcttgaccaacataatgagcccaaccaccgccgtttacaccttgtgctccaacgagaagaacaagatttaaaacggcgcgataaatcgtatcagagttaaaccaatggttaatacccgctccgacaattatcattgagcgaccattcgtatcaacagcattttgtgcgaactcacgagcaatttgaataataagctcacgttttactcctgtcattttctcttgccatgcaggtgtaaacggtatatcatcattgaagtctttcggttcttgtccgccaagccctcggttcacaccgtaatttgctaacgttaagtcgtatacagttgtaacgaacatttcgccctcttctgtcataacctttttcactggaatcgtacgttctaatactttgtttccatcatcagagaagtacggaatttgtacagttccaatcgcttcttccattccaagtaaagaaagacgtggatcaatcttttcacctgtttcttcatcttctaaacgcaagttccatttcttttcattatcccaacgtgaccccattgtgccgtgaggtgttgcaaaatcattcgtattctcgttccaaagaacaggtttccattcccctaacttcgtttctcgtccaatatcagaagcatttaagaaccgatcagcaacgaattgatctcctttttgtttcaatgtgacaaagaaaggaaaatcagtatattgcttcgcatactttgtgaaatattccacttgattatctacgtaaaattcttgtaagattacgtgccccattgccatcgcaagtgcaccgtctgtaccttgtttcacactaatccaatcatccgcaaactttgttgattcagcgaaatcaggactgacagaaacaactttcgttcctttatatcgaacctctgctaaaaagtgtgcatctggtgttctcgtcattggtacatttgaaccccatgtcataatgtaaccagagttataccagtcactactttctggtacatctgtttgatcaccccaaatttgaggagaagctggtggtaaatccgcataccaatcatagaagctaagcatcggtccacccataagttgcataaagcgactaccagcagcatgacttagcatcgacatagctggaattggtgaaaagccaacatttcggtctggaccgtatttcattactgtgtacagtaatgaagctgaaacgagttgtaatacttcatcccaattcgcacgaatgaatccccctttaccacgcgcctgcttatacgtacgtgccttttcacggttttccacaatgcttttccaagcctctaatggtgactcgttattttgcaattcttcttgccacatattccaaagaacaccacgtacatacgggtatttcacacgaagtggactataaatgtaccaagaaaaacttgctccacgtgggcatcctcgcggttcaaaatctggcatatcaggacctgtagtcggatagttaagctcctgcccttcccaagttacaattccatctttcacatatatattccagctacatgaaccagtacagttcacgccgtgtgtagaacgaattactttatcatgctgccaacgctttctgtacacattttcccattcgcgatcttcatatgtttcttgtgtatgattatcgttataacgatctattggtgaaaaatattttaaacgtctcattagtgctgaagtttttttcttcatactgttcactcctcgtatagtatgtttaaacttaatttttttactttcatgagagacctgtaaaataactcttggacgtctcaagatagttattgttgcttaagataaatttcagcaacactctcacttcacgtctaaacgcttatagagaaacgtgtcgcgcctgctgcttgcatcgggtcatttcccgctccagctgactcctgcatcatttgggctgcgagaataccaacatattgagcaaccccatgtttttccgccatctctttaattttaggaaggtaacctgttaccttttcattgatattgacaggttctccacctggactcacagcacctacacacataccaccaatatatccaccagtagtaggagcaagatgtccatacattccttctaacatcccggcttctaatatctcacgagcccgctctttttgacttttactaaactttgcgagttccatggctttctctagcccatgagaagatgttgtcacttttttacttccactcgcattaatctcatctatttttttcttaaaatctgtatctcctaatatcttttttacatctggtccagaataactttcagacttggttttttgcatctcctttttctttttttcgcaaggaccattcggtccttcctcgcatacctctttttccgtatattcttcatattggatatccaagaaatatgatatagcatcatgcggatctttaccagttaaatcattatcatatcgtgccatgtcaaaggcgacaacctctttccaatccacattcagagccattgagacttccatatatttttttacttgttcctctgtcttaccttcatcatcggtaaaaggtacaaaagagactaaaatcacacacacagcaataattactcccataattaaagcggcaggtactccaaccgctgctataacggcacccacaatttttagtatacctgcttttagcattttggcagcagctttcgctgctgcctttcctgctttccctgccaattttgccatcttcccgcgcgcttgcatcccttttttcttaataaagtgggaagctacatcttttaaagggttactttttttctgttcatttggatcgttaggattttgactcatagacttatcacaccatattttccattttgagaatttcttcctcttcgctgtgctaagcgagggtttggcgcaaatggaatcagattttgtgggtcatgttctgataaattcaggtgcgtctctgtacgaacaaccttgtcctgtgtatgtgttactagaatttcttctcttggcttaatactactgtccttcacttcacaagctctttcaatcctttggtttgcttgtaagcgcgtatctccttttccgaatggcgaaatacgtgacagtgtaccgtctgttgttgtcgcaaccatataactacgatctctttctacgaccatttgtacattcttataaccaccttggtctaaatcagacatatagaagtgaccattgtccaccttgtgattgaccgtaagtggcggttcattaaatactgatttctggtgtaatgacctttgattttggtttcctactaattgatttgggttaacgttgatagaacgattgatactaattttcccaccactagaatcttgaacatacgctggtgtagctttcataccattacggtactgcgttaattgtccgtccgaaatatttaaatcttgatatacgacttgtcccgaacgaatactactatcaccactagcataacgagatacaacttgcgtcacgccactagaatcttttgcttcaatccaggatttattatttgtcgtaacaagacgtactgcaccttgaacaaccgattgttttccagtagcatccgttgttgttggtaccattctctgaatctcttgaatttcttttgcctctgtttgaacagcattgttataaggattatgtttacttaccatacgtgcagtcgcttgataagcacctgcaccaccaatcacacctgcggcgtaacttaagccttttgtcacattatagtgacgctctgctgcattccctcctaatgatgtattaacagcagcattagttccacttatcattctttgtactgcattccctccggattgttgtacagcactcgcagcactatagtatgcatttgataccgtatcaatgctatccgcaagcataaggtgtttcgcaccttccattacactcatgccaagttttgtactctgctgtgtcatacgtcccactgcagatgttgggatagacattttaccagcactttgtgcaatatttgctacacttgttgatgcatctgcataagagcgttcaatttccgcaacggaaagatctcctgcatgtgctatactcgcttgcgtttgtgtcgccgcatatacagctttattgattgcgccacctgttgcaacaccatgtgaacgaacaccttgaatcgcactagtaattccagaacctacttgttgactcactgttccaagatttgcatggctttgtaatcctttcgttaattgcgaagtaaaggcatctttattaatatacgattgattatgtaaactcttaccactcgtatctttcgcctgtacgggcatcgctcccgcttgtactgccgcttgttgtgccactgctttaaattcatttcctttttcattcaggtgcgactgccaagcttgctctttttgtggttgagacatagttggagacaactttttcataaagcttgcctgttgttctgctgcatagccttgtttaaaggattctgtagaggcttgtaccaggttctcaacattacttacttgtttcgctttctggcttcctgctccacttgtcaaaccgtgcgttttcacaccgttgactgccttctgaatgcctgctgtgctagatacacccatagcatttaaaccaggatctttttgtaactgttgtgataaatgagaagcgaaagcttctttattcgcatagtttgtaccgtctttttgctgtacaataccagctgattctgcagctttttgcgcatgattttgaaatccttgtactttttgacctaaatgtttattccatgcggcttctttttcttgttgcggcatatctgcagggaattgtttcatgaatccagccttatggtctgcactatacgctttcttaaatgcagcagtagaagcaccgacaagagcacctacttgtcccatattttgatggccactttctaacgtttctccttttacatcctcaactgcttttccgacttttcctaatgcaagtcgggaagcaaacgcatctttattcacataggacttatcaaacagattatttccttgcttatccttcgcatcaactggcatggctcctgcttttgttgccgcctgttctgcgtggtttctaaatccttgtacttttgtgttcaggtggtcgttccagtgtctctctttctcttccgctgaaatattttctggtaactgactcataaacgtatctttatggtctgcctcataacccttttggaatgcattcgttgcagcgttaactaactctctagcatttccatatggtgtagcggttttcttcatattttgtaaatcttgtttccgctgatttgagaaacgagacatttgatcattgtttgtttttgccacttttttagcaatctctgcatcggaggcactagggaatgcgtgttttaagcgacttgcaactgcagaatcgggattatccgctttccaattttcaaaatcttttgtagctaaatcctgtgcaatatcttcatcggttagttctggataagatttgtcatttagatttgaatacgtatccgcacccttctttacactcgaaccaatatgttttcctaaggctacagccccttcgccaactgcagcagcagatcttccagtaactgcaccagtaaatccgcccgctttactgccagcaaatgtccctattgccattccttctggtccaagaccagctcctgctgtcatacctgcaagtccaccagccgctttaccaattgaacttccaatttgaccagcttttaacatacgagctgcacgagatgttgtaccaacatctgtccctaaattcgctcctaatgcatctttcgggttatcagcatcttcttttgtcttttctttatcccctttatcatcaggttttgcttttgaattacggtagtcatcacgaacacctttaacgagtccagccacacttgctaaagcacccatacccatcatcgtacctgctctatgaatgccacctgatgcattggtactaaggccaataaaactttttacaatctcacctattgggataaacatagcaagtaaaattaatttgattaacggactatttgctgctccaattaaagaaataatgagccataaggtaattgcatgaattgcttgtatgaacaccgctcctataaattcacgtatccaatataatgtctgttgtttcttttgtggaaatagccacatacctaccattaacggaccaattaacattaaaacgtatagtgacaccgctcgcattaagtagtaaaagtttgcccagacgatgagaccagcttctataaacaaaccaaatataataaacatatagtcattttcatgacctttcaaacccagctcagtaatggtaagtccagccccaccaaatccaggttgtagaaatttagtacccttatctggatcaaaatcccccccacttgctacattaacagcgtctctaaactctattattatccaagaattgatttcaaatatgagtgtatagaagtaatcgaggtgccaaagaaaaattgaaatgatcatcaaatccttcgcatactctattaatgctgttctattatttggattaatagctgttgccgaatattttgccgccgtaataactacactgacaaggacacaaaaagcaacaagcttgaacatgacaggcatgcctgtgtctaatactttggttagagaattacctgaaaataagaaatctaagtttgtcccctttccttctgttccctctcctccaaacactaaaactggcagcggatccaaagttgcatacaccggactaagaaaagcctttactatagcaataattaagcctccgacccactctactattttctcaagcataatttcaccttcctttttaagagtacgccattatcctgcgtacccttgtactttcttcatattgtttaaaagctcttgtagtaccgcttcatttgattcaatgaacatcatttctttgtcagatggatcagtttgaatccaaaccgaactatctccgacacggaaaatcccttctccttttccagggttgttgagaataatatcaagctccccagcagttaagttaaagttctcctggatctttttcttatcaattttattttgttctaagaagaaataagagaaagtagattgcaagataccacgagcttttacattttctaaaatacgaacaaagtcctgacttgcccaacacataccggcatttcttttacgtgaacgacgtgctactttttccaagaagttaaccgtttgttcatagtcgataaactgccacatctcatcaacatataatacttttcgcttgatagcgtgttctggactcttaatccaatgctcccaaatatagttcaagataacgtggaaagcgattggttttaaaaacccttcctctaaatgactaatgttgaaattaacaacgcgtgattcatttaactgagtttccacaccacgaccaaaatgactttgtccatcaaataatggttttgaaccatcgcgtaagaatggtcgaatcgcagcaattaactcttctgcttttacatcgtctccatgatgttctactatgacatcatagatttcttttaactctggctctggctttctcacttgagactgaattaactgtccatccactttcttcacttcatctgtatataaagaggaaggatgtgaagtaataccatgtttatcaaacacttcacggattgcatcttctagcatagtacgttggaatacatttaatcctggttgatcaaagtcttgcccgcgaataataatgtcaaagaaacctagtatttcattgattttctctaaaattggtacaaatctcacatacttcatgccatcacactctacaagttctttcttatcatattgttcaagtgcttctagctcttcatctttatccgtaatctgaagttctgttacagcgattgcacaaggattgataatgatattactttcaggtgaaatatttaaattaataccacctagacgttttgtaatttttacgaattctccttctggatcgataatcattgcatgcgtatctgcaagtgacgtttcacgagctaacttcatttttaaaagtaaactttttccggaacctgagatccctgttacaccaatgttatagtttggcgggcgataatctgcattaccaaatgaatttaaaaattctacttgcccagtaattttattctttcctattggtatgccaccattaaatctcccggatcctgatacaaatggtgcaaacgtacataacgcacgtctatcgatatttcgataggtatcttgcagcgtatttggtgcacctaatggcatagtagctttcaaaccacttttcacacggttccaagtacttgcaatcttaaaatgagatgcttgcatttcatcttcaatatactcacataaaacgtccaattctttctttgattcggcatacgcaacacccatggtactcaccatataggagtcgttttcattgaactggatttcatccattaaattgtttgtatcttgaatttttgcatctaagtctttttcttggtcaatgtttcctcgtgtacgttggaaagaaagattcgaacgtaacatcgtcaactgcatatctaatgatcgcattgctttagcttttggttctttatgaatatcgatcatgacatccacttccccagccgaagttaacatgttgagccaattggtttgcatcatacgcgggtacccatcacgtggaatataaaacggacggaagaacgtattacttcctaaagattgtttaatgaccccataatcttctgcatcaattttcattccttctggagcaataacatcaaacactgttgtttgattatctaattgcgtcggtacttcctcttcttccgcctcttcctcctctagctgcaattcatccttctcttctgcttctatttttttcttttcctttttcttttttccgaataacctcatgtttacgccaccccgttatttgatttttctgctttttcttccgctagcactttcttcattatctctagttttctttcatttgtttctcctgttgaatagagggagaaattctcgttttcaattaagtcctggaaacgagcttttacagctttacgacggttaaatgctacgtataaaagttctattaatttatctttcgttaacatttctacattaatttttgctttcgatagtagatttcgagaagcattataacggcgatataattcgttaaacgccttatccacaatcttttcttccaactcttcctctgtatcagcagtaatcgtactaatatcaaccttgtatgggtaaattaaataacgtttttgttcatatcgaggttgcgaacgttgccagtactctaagttatcgataacttcttgcccatatagaactgtctctggtgtaaggtccttcgcacctttcattgtttctgtcatttttcgtacaggatctgttaaatctacaaacttactttgaatatatactttcgtattaaactctaatgtggttaaccatgattcaattttgatatcaatcgcttcttgttccatattggaaagtaagtaatagttaactggatgtgcttccgcaatcaggacaaatgtgtcgtcatgataccgaatcatatgattatcgatttccttaatgtcttctacaaaagcacgaaagaagtcaacattatcctcatcaatttccgattcagcagacatattttttttatttttctttccagctttttcaatagtgtgtttctctactccaccttgctttttcccttttttcttagaaccaaacagtggttttccattcattttccgataaaagaaaaatcctacaatggctatcgccgcaaaatatatcatttctaacatttacagattctcctttgcccatatagttggctcgtacccttttctccacttacctttttcggagcggctacgcattttaataattaaatacttatctagatacatatgttgtttttctttatatataaacgcaaacgctataacacctattaccgttggtagtgctaaaattaagcaaataaaaaacgctactactgcatcaataggtgcaaatagtcgccataaaaatggtacatataaataaagggatgctccgccacccaatagataaatcaattggcgcttgctcagcacacctagtagtgttttttgttccgaagtcatatcaacaggaacggttacttttctcattctttttcctcccttgtataagagaagctctccccaaatcgaggaaagcttgtacaaactcttatgttagattgtcgtaacccaagcagcgatatcgtacgctttgatcatcacaaagcctccaattgctgcgcaggctaaaccaatcatagcttgtgtacggttttcaggattcttcccttgtgcaccagatagtttaatagctgcaaatacaacgcaagctgccacccatattcccccaaaaccaattaaggttttcaccaaagtgttcatgcttttttggacggtttcagcattggcaccactgccactaccaccaagccccttcgtaaagctactttttgccagtaagaaatctcctactgatgttgtcataagttttgcagacaaccaattcaacataattcctgcacctccaggtgtttttgttcgcaaaacgcaaaaagacctcaatacacgcacacgtcccctaaggacatggcgcatattgaggtcttctcttatatgcgaactgattaattttatatttttattgtaaaatcttattacctttatattatagcaatacgtttttataaaaacaagtccttgtttacacctttatttataccctctttgttaggatcgtaccatactataagaataaaaaaaatattaccgtccttaagacctaaagcattcttaaacagactataattagaagcggatactatgtccaatattagggcataaatccgcttttttcttacatgatatattccataattagaggttgaaagtatggtctattatgtatacaataatacgagaacttacgttcgattttgtattagggaatatagcccacaacgtgaggcgtagcaaggtcgagagaccgatcgtacaacggagttaagaggtgaagaactatgcgtgtacaagaggtgatcctagagaatggaaagagatacatattagtagattcagatggggttcctgtgattcctgtggtgaagtacctcaagtatttggatgttacagggaaaagcagcaacacacggaagacttattgttgtactcaaacagtatttcttgtacttacaggaaacagagaaagattacaagcatataagattagaggacttggtggagtttgtgggatggcttcggaatccgtatgagagcaccaagataatgtccctttggcctgtgcagacattgactttcgaacatctaatgattccgtctaactttttcatctttaacatattcaaaatctctatttctttatccgcgctattatccgtttggcagagcatcatattgtaattatgttttacagcctctcttgaaataccttctataacttcactgtaatattgattatttacaaatggaagaagcactccaataacatttgtttttcctcgtactaaatgaatcgcattcgaattttgcgtgtaatttaacttttcgataattgctaatatctcttttcgtttttgttcatttacatacggataattatttaaaacacgagaaacagtagaaatcgagaccccagccagttctgcgattttttaatatttgtcatcatacacactcccttcccactacatattagcgcatacaaaaaaattgataaatgccccttgacctggtaagcatttcacatcataccatgttatggaagactaaataagaaaggatgtatgttttatatgattttgtaagtagagcacatatttttcataggtggattaccaggaaaataataataattatcgaagggagagatttacttgttattctctgagagatgtgagttacacgtaatttccgaaaatgattataaaaacattaaaaaattatatgaaaacgagctagtaagaaaatacttaggaggtattatcgacgaagaagcatataaaattagattttatgatatattaaattcaaaaaatagctccctccactggacagtatttttaaaagatagtaaagaatttataggttttgttttccttgatacatatcatgatgggattaatacagagattgggtatcaatttttacctgagttttggggtcaaggctatgcaaaagaagtgattatgaaagtattaaaccatggatttagtgcattaaacttaaccactattgtcgctgaaactcagtcacttaatatggaatcttgtggactattaaaaagagttggaatgaaattcgaggggacattggaacgattcggtaatcaacagtctaaatttagtatttcaatttctagtggaaagtaagcccgaaatataaaaaaagggccaccttttcggtacacacgatgaatggccatctatcctaatttttttcggatagatggctagtttgcacatgtggcttggatttttttcgaccaaggcatgtaattatttcaaatcgttagctgctggtgaatcggtaaatttggcaattctgttattaacgtcactaggtattgatagaaatcgataacggtaaaaaacgccacttataggggtcaccatacatgcatatcaacttaagaaaacagattcaccccaaaacgaaaaaataagcttaattctcaaatataactgtcgagaggtaaaatttttgttttggtggttcttcaaaatattagcttgatagcgatgtggcgggaccccaatatgaagtaaaagtgcgatacatattggtcatgtctaatatgtatcgcactttattctttatgactttttacaatttaggtcttgataagaatgtatatcttctttcagtgagcaacatgattctattttatccattttggaattttatctctaagggtatgcgcttcttttttcttattcattttaatctctccaacaacttattatgctccttaataagagtatactacctattaaggagtgtctaagccttgtgtttatcaaactattcattagaaacaaaaaacaggtaattgtgcgtttttcacaagtacctgtttttcactacttctatctactctttgtttcttaaaatttcattaaccttttcgacacttaattcagcggcttccgctatcttctctataggtacacctactttaattaaattatgaatcatttctattctagcttcttttgctgctttttcttctgccgtctctatttctgatattctatcttttattgccttctctctcgcctcatataagcgtaaaaagtctttatcactacttaaacgctcccaatcctctattgcctttttcaaaactggatctttttccatcgcgattccctccaggattgtagttaatttctcatcttcatatgcaggaaataataatagccaacgtgctaatatatcctcccatggatccattcgattttcttgccattctcgaataacctttggaatctcaagaaagtgcaattgcatattctctgaaattatgtgctccgattttttgttcatgactacaccgatattatgaaagtcctcttctcctggaaacagaatgaaatccactatattaatacaaatggttggtcttaattctgtatacttcatcccctgagtcatttgagaataatacatgccagcccagtagaacaaagatcgctcgatcatgtcttttttgtcgcgaacctgtatctctatatttaattttataccactattaagggtagctcgcaaatctaaaatagacaatttatcatccttttgttcccttggaagatgtggatcatctaaatgcaaagaaataatttcctcatctaaagagtcttgtaataccgcattaagaaaaccaatgagtatatcctcgtttccttctaccccaaacaagcgcttgaaagcaaaatcaactcgtaaatttactagatttttttcatagatgtattcatattctcttctacctttcttttagtgaatttaaatcctctgtagtaattgaatataagaaaaagatagaattacaaactctatctttttcaatctacctttagaaagtttacttttttctgcacgcttaaccacttctaacactcaatcatgatgcacaatctttgcaagatcatctttcttaaaaagacaatccacatctgcagtttttacatgatagctgtgtagaatcggcatccatttctagaaaatcacggattgcagtaaagcgataacttttccctctaaagcatctctccaataaaaaaggaaatctcgtatacatccattgaaatagacatgatacaaatagattcccccttttttatttatatacctaaatctaaagacctttttacaaatgattcctaacttgaagacaatacaaaaagggcttcttcaagtcgattaaaaatgtgcatagcaaaataagctatatatacactaatcggctcaaaaaagccctttcataaataaaacaagacgcaacttgcttctacaactcaaccacaacacaataaggtgtgggaataaacggaatcaattaaacaataaatataattccatattaatgaattcatacaaaaatttcaataattttatgttttcttaagatatcccgctcatttttttaaaattcatatgctttatcactaccttgttttcttcatcaaatgatataactccctccacgataatatttaatttaatattgaaattctctaaaactcgatgtattatatttttgtgtttttctcagttcccaagccgagaatacatcatcacttctgaaaggacccgaactccagcgggttctttttatttacttgaactcattttcgaattattatattatattttcgggtcttgctccataaatcattatcaggagaatctgcaggtttgcaggttctttttttataaaataaaaaagcagctgttaggttacttaaagtttgtcttatcaccaaataaaatgatatatatattctcccgttatactttcatcaactcctgcaactctagcaaatcttactatgtccgccccctgaatgaaatacatttttagcataactggcacccgcgaccacataacacgataaagctcattcactctttgcctagtcgtaacaattaaatcatttgcaggtccattaatccacgcagttgttctaactgaagtaaacggaagatctatcccattagcaactattcttgcaatactttgcgttatatccacatcgatcccctcattccaagaatcaaatatgtttcctatatttacataagtattcttagttataagaaatgtttaaagtaaattctttataaaataaaaaagagtgctattaagatatgcactccttcaaaagactttaccaatctcgatgttcaccatgatcatgatcacgattgcggtcatgatcacgtctacgacgacactcatcacaatcgcaatcgcgtctacaatgacagtcgttaaaatcgtttcttctacgtctacgaccgcatccgcaaaatactaaatcatcccaaaatctattacaatctcgagaatgtccaaaattattattccatcccatagatatgattccctcctctaaaaatagaattcatcatattctatgattaaaaggtgaaaacagcttgtttactagtctatattttatgttttagactaataatatttcaatttgcaagtctatctcatcccttatctttccttaacaacaaacaagacgctacccatatcacggcagcgcctacgataattgctattggtttaatcattaacaagtatatctggtcccttcttcaacatgtacgagaaacccgaaataaatacaacactaaatataataatagaagaccacatattaaattgatattctttacctgcaactaaattatatatgttatgtaccaagaaattagcacctataataatcccacctaaaaatgcactaattaatatgctcattaaataaaatttaagtttctgaaacatttttcctctaccccttttctaaaataaactttatttgagtttctttagaaaattataccatttagttttcagttattattaaattcatagttaaattaaggttattttaaggatatgttttctattcaaatttccattttgttcaataaaaaaagaacactataaagtgccctaagcttctgagtataaaatatacgacaatgccttgcccgttctaatggcgcaacctaaaagggctttatagcggaatatatatatatcggaaaaggaataagttgattggcattgactcgatattgtatgtttgggaattccttatgtgcaaacgaaagagagcactcccccaataagtgctctcgcttaaaaaaatataggggaacatgttggaaaccgttcagtatcattatatgatatctcattcccaactatgcctaagtcatgtattaaagggggatcatgtgtaatttctatataacaaagaaaaaagcacccgaatggatgcttaaattaaacttatttatctctactttcatcattaactgatttcgggtctaacatgattcctatatccggcggcaaaattagctctataccagctactggttgattgtcctcattaaaataatatttctttatcttattcaattcttcatttttcttattttcactcatattatcccgccttttatgtatgatattaaaaacttttattaatatgtacattaagaaagataatatactatttttcaactcccacacaacttataaaatttttacataataagagaacacccataattgataggtgctctgatatataaaatggtttccatccacacattccaatatatgctcgtctatctcgaaagatgtaaacaaaaaagcacctaaataggtgccttttcaaaacgtattaacgcgagtagcgaacacaatgaattcttctcggtgtcattaccatcttatgttcgagattcttaaatatgcctaatcgttaaaacctttattatgaattcactacctatccaccctttatttttttactagttttaacaataggaactttttttgctggtatgaaaggattttctaaaataaataattgggttgcgatgcttagaaacatagcaaccgttctactaatacttttattatcagtgtttttaacactaactttgaccgttggctatgcattaagttaaacgtaattcttcacgaataaaaaccaatattccgtcaatactgtagacaacccatttcgaaccatattccattacctgagcagttagcttttgctagctgctctttatttgtacaaggtactcaattgactggcgcacatataatattctgagttcctttctttataaaatagtcgttataaaatgaggctcgtcacgagagcactttactaagtgctctttttatattccaacttaatacaaaatgaaattttcattaagttttctatcaatacaatatggtgctttcttttctgaattagtttataaataaatagttcaacactgaactatcctatgttaagctaatttaagaaagaaaggaattgagtatcatgagtttaaaagacaacaatttcaaactagctggagaagttgttcagtcatttatatccattaacaaagaaattataaagttcacacatcaaaatgcctccagtttagggctaacagtacaacaaatgggtattttaaatacaatttatacaatccctaatatcactctgaaagagatttcagaacgtctttcagttcctaaaagtacagtgagtgtaaatgtagatgatttagttagtctagagttcatcgaacgaaaacaatcagatgaagatcgtagagaaataaaattaaaagtaacacccaaaggacaagaggcatcgaaaaaatccattgaaaactcaacttcctacaaagcgatgtccctagcattacagcagcttcaagaagacgatgtccaaacattattgcgtatccataaaaatttattaacctctctaatgcaatttcgttaattgatgtaaaacataaaaaaacaaattctaattcttatttttcaaaaaactgagcagttagatctcactaactgctcttttatttaaaatagcggttttgttgaatttttattaaatttacgttgaccttttgttgatttttcttcacatttaaaggaaacaaacatacgcttttgtatgtagtctctccgctcatagagatctacctttcttatcgaagagcatacttacatgtatgctctttttgcttactacaagataacggttttgtctaaacctacacatatctaaaagacatacatcaaggtgcctccttttcctaattaaaattttaaactctcaccattcgtcgcaattacttctttataccaattgaaactgtccttcttcgatctttttaatgaaccttttccttcattatctttatcaacgtatatatatccataacgttttttcatttcgccagtagaagcactgacaaggtcaatcgggccccaacttgtataaccgataatatctactccatcttgaattgcttcggacatttcgatcatatgcttctttagataatcaatacggtactcatcattcacttcgtcttcatcatttaattgatcgattgcaccaagaccattttcaacaacaaataaaggtttttgatagcgatcataaagttggttcgctgtaatacggaagccctttggatcaatcgtccatccccactctgatttttcaagatatggattttcaactgaaccgaatacattcccgctcgttatgctttttaacacttctgaatctgtacttgttgctctacttgcataataactaaatccaatataatcaacagtatactcttttaaaatttcttcatcttctttttccatttcaattgttaaattattatctttaaagaagcgttttgcgtatccaggatatgctcctcttgcttgtacatcaatgaagaagaatgattcacggtcttgttccatcgcacgaagaacatcgtctggattacatgtatatggatacgttgcaccagctgcgagcatacaaccaatttttgcatctggaatgatttcatgacaagcttttacagctaacgcacttgcgacaagttggtgatgagctgcttgatactgaatttgttttttattatcatcttctttaaatgctagacctgctcccatgaaaggtaaatgtaaaagcatattaatttcattaaacgtcatccaatatttcactttatctttatatctattaaaaatcgtttttgcgtacgtctcgaagaattttacaagctttctacttctccagcttccatacttttctactaaatgaacaggcacatcaaagtgagccatcgtaacaactggttcaatgccatgcttcaacagttcatcaaatacgttatcataaaactgtaatcctgcttcatttggcttttcatcattaccatttgggaaaatacgcgtccacgcaatcgatacacgtaacgctttaaatcccatttctgcaaaaagagcaatatctgctttataacgatgataaaaatcaattgcttcgtgtgatggataaaactctccttctactggtgtgaaggaatgaatatttcctttcataatatcccagcggttttcaccagttggtaatagatcaaccgtcgttaatccttttccgtcttctacatatgcgccttcaacttgattggcagcaatcgctcccccccataaaaatcctttaggaaaaataactttagacatatagaaaaactcctttatataagatttaacgaggaaaggtattacgattctcaaagaatgcctttcttcgtgtgaaacataatgaaatgtaactactatttaattcctagctctagtaaagaatctcctgcttgaatcttttctacttcagtttttttcatactatatttatcataatttgtaacaacaactggtgtcgtcacaatataacccgccttttgaatttcaactatattaaattcaataagtaattgccctttttctactctcgctccttgttcaatatgagaggagaaaaactcgccatttaatttcacagtatccatcccaatatggattaaaatttcagcacctgaatcccccgtaattcctactgcatgattcgtcgggaacagcgcagaaattgtacctgatagtggtgaaaataactttccttccgaaggctcaatcgcaatgccttcacctaacgcacctgatgcaaatgcagcatcatcaatgttttgaagtggcataactacaccatgaaaaggactaaagattacttcatcatcgtttgatgcagcaactttatcaattgttccatctgtttctgtagatatttgcttttttgtaaaaccaaataagtaagtcagaataaaacctactattaaagaaacaaccatcgaaacaattgctccccaaaatccagctgtaatcccatcttccggactaataaatgtcggaagcgtaaatatgccaagcccacccgtcatataactttgtgtaccaaatacgccaagtattgcgccgccaactcccccagcaatacaactcataataaacggctttttaagaggaagtgtaataccataaatcgccggctctgtaacaccgaaaatacctgaaataaaagccggaatactaagtgtttttaatttctgatctttcgttttcatccaaacgccaagtacagcaccaatttgagcaaatgaagcagcaaatataagcgctagtatcggatcaataccgtgtactgctaaattgttatagccaatcggaacaacgccccaatgaaggccgaatatgacaagcacttgccagaaagcaccgagtaaagcacccgcaactaatgggcttgaattataaagccaaagcgtcgcctgtcctaagaactgccctgcccacgtcgcaattggaccaataacgagaaatgtaactggtacaacgattagtaacgttaagaatggtagtacaaatgttttcacaacatccggaatgactttctttaaagacttttctactttcgctccaaaataagaagcgaggataattggaataacagatgatgcatagttcattaaaataactggtattcctaaaaacgtaatatgaattggtgattcaaacatagtccctgcaaataacgtatataatggctcacttgctgttataccggatagagccggatagactaatgctccaccaattgccataccgatgaatggtgatcctccgaatttcttacttgctgtatatcctaagaagatcgggaagaaataaaataacgaatcgccaactgcatttaatatttgatacgttcctgactgtgtacttaaccagcctaacgctacaaatagtgcattaaatcctttaatcatccctgttgcagctaacacccctaaaataggagtgaaaatgctagagagaatatctattagactactctttttcttctcactcgcactttcttcctctgtttcttgaaatcctccgacagcaataaccgctttatacacgtcggatacatggttaccaattacaacttgatattgtccgccgcttttcataacagtcacaacatcttccatacttttcagtacttctgtattagctttcccctcatctttcaactgaaatcgtaagcgagttatacaatgtataacgctatctatattttctctcccaccaacatgtttcagtatgtcttttgccaatttttcatacttcataataatttctcccccctacaatcatctcatttatcatttttataaaaagaaaaaacctaaattaaccataacggtgcgatacatacgaatcactccattacaagtcaatttaggttttgcctgctaaacagtaacaatcccgtttattcaattacataattcattgcgtttcgttacacgatgaatgtgcaacgtcaaatacaccttttcatcttttgaaagatgactattatgtgctttttgtaagtatgcttcaattttttctgtacaacaatacgcctcttcgtacttatttttcacttgctcgtataaaaaatcatcatcggccgagctcaattccttctgcattaaacgctgagcaaaatatcgcaaatgcgttacaaaccgactataattaaatgaattctcatctaagttcatcttatagtggtactttacaacatttaaaatatcttggacgattttcgtcatcgttaccgtttgttgcattgccggctctccttgctgtgcattaacgaaatgcagtgcaattgaccctgcctcatcttcagaaagtctaagcccagtctcttcttcaatgatgttcaaagcttgtagaccaatttcaaactctttctgatagaacctctttatctcccaaagcagagtatttttgagattcattccttctttatgccgagttaaggcgaaacttaagtgatccgttaatgtaagataaatataatcacttaaatcccccggcaaaactgtcttagcaaactgaataattctctctgtaatctctaaattttctacaggaatttcagttagcaacttagcgagtttctctgataattctcttgtttctagcacaaaggttttttctatcttagattcatcaatcgcatcgcctacttttttctgaaatcccaaacctctgcccataagtacaacttctgtctcattatccttcatcgtacaaacaacattgttatttaagattttatggattctcatattgttccaccttcttcttaaagtcacaaaaggtaataaaaaaacctaaactgattccaaaagccacactacacccgtagcctctagatcaatttaggttttgcctgctgaacagtaacaatccttttaattattaacttaccttcattatacacaaaaaggaagcggttgcaacgataaattattgaattttttttacaaagcaaaatactaacagttaatcagctgttgcttaaattccactaaaactttctctcttcataatcttccgtatcagcttctttctacaactcctgctacgtagtcagttgcttaatattataaagcaaagaaagaagaatatagtttagttcctgtaattaaggatttaagtggcattttacttattaatactttaaggttttttgattgttgtactatgattacccgctctaataaagatgatgataaagatactcttgagtataagaaagaattatctagtattctaagtgccattaataacaaccttaacaaaaaggaaccaatttacttcctttttaacaaaaatgaaaagttcaagtttgaccaaatttaaactgttcgtgagctatatgaaagttatttaattaaaagtgagctaacatttaaatcatctcatatgcccttgctaccaaaaacattcttaaaaaattcaacaacacctataaatatagaaatttatcaaaagaatgtaatggaatttcttgatggacataaaaagtcaaaccttggtctagaacaagtagaaaatttcgataatatctataaatctatacaaaccatgcaaaacaactatataaaataagagaccatataatggtctcttattttagtacaatccattcatagcttgcctactcttttgatttcttcatttaggcatacggactaacacaatcctctattttttcaattgatagcctgtactatttttctgcaaaatggtatataaacgaaaatgtgttgtcgtaattagtctagcttttgttgaagattcttttctaaattcttgaagtaatgtataattaaagtgtcctacatgagatattgagtcatatctcatttgtcattcaaaaaaggcctgtatataaaaataaggcctttttgtatgtattcctaaatatccttcttatcctccagtttgagtattagtatgattatctgtcattttaaaatattacatactattcactatctccttgatcatttcaagttaaataaatgcaatctttttatgagcatttttacgattcgtaatccacttgcactacttacttagtacataaaaagtgagattagtcagcagtttaatttactcacattttttaatttagttgttttacccataattccttttcatagttaagggccgatcctaaaacagctaccactttattaaaccattgtaaaatttcttctttagagaatgttcctttcaaaaatacaacttaataatatttgaaacacgtcaatacaatggtatatgttttaaaatatatattaaaagtaaaatccttatttatcaggtttttgtacactatgtttttctaattctcccttttcaagggatggacaattaatgattaaaaatacaaaaattcattattaggaaatgtggctgcggtccagaacagctatcctttcactaggcttatataaaagaaaccgaagtcatggctcagacttcggtttttagctgtacttaacctcacctttttatctcttaacaaaactttgcaacagaacactatatttcctattaatatagttaatccaatcgagcaagccgaaataaatttttgaagtatgcatactcattttctaattagattaatataaaaggaatagaaactttataatattttttagtttggaagagcgtagaatttcactttaaatgtaccgttagaagtatatccgctaggaggacctgagatatacaaattctttctattatctcctgaagggatcgttagaatagaaccatctctaacagctgaccaaattctagagtctgcacctgatttatctcttgaaatgttaaatgataaagaggtagcacctgctccttctaaaacaactcgtactttggtacctgccgtaagatgttcaagtgaaaaattattacttgatctactgctttgaccaggctgtgccttatagagtgactccacttctcttgttaaagttcctgttacattagacaatttgaatgtttgattattatcaccatggaaattatatactgtaacatttgttccatttgcagtaccataaccacttacatctaacactttgttttgatccttcttattccttacataataatatccatttcctgcttctgttggtatccaatattgctcttccttattttgattagatgtagcaactacattattggaaccattaagatcattccaagctaatactaaattttcatttgttacacttttaaattgatatgcatttttatttgaatcatatactagcttccatttttgattattagcgttgcgattttgccacaacagaacatttccatctgcttgatttaagtcaacaacactactattatttaaagtagaaactatttgataagcaccgccatcttccagttccggtgcgtaagggttaaagtcattggcattggatggctttgcgctatcaagggcttcttcaaatcttccatctttgatctcaagtgttgcagatccaaagttcgtagtcattagtttttctcgaatagctaggcttggatagccattccaaccaaccattggtaaatggagccactggtgtttatagttttctggcggctcgtcattgctattagccaggcgaaaagcatgtgtcgagaggccgtccttatggtatacaattttcgggtggcttccactgaatttaacgtctgagcgaggcttagtgtaccagttaccatgtgctgaataagttacatattgaacctgaccatctttaatccaaactattgtgtgttcccagtcatgtcgatgtccagacgcagcagggcccgaagttgattgatctttttcaaagtaactcgcatacataatggcagtccaaccattatttgatttggcccgagaataagtgtttgaattttccagtcggttaacatctctacagacactttccggggaaccgcccaaacttaggccagggttagtcgtgccatctggagaaattgctgcagtcgcatagcacccgtctgtgtcgtaatcatacacaggagcataatctaactctatctttgacgcattttgtggaagtgccttgattacatccccatatgcttttgggatagaaagaaaactcttatctaattctccacctaagttgaatgcaaatgtactcaatacaattaacgcggtcattactatttttgatattaatttcatattactcctcctagttatatgaataaaaatcattactaaaaacattttttaaagtagcgtagattataattttcagctctaatcctcctttcaacatataaatatagttttttggaaaatatagctcttaacatccatcataaaggtccacttttgtctaaacgtaaaaatcctcaaaatagcgtggtgacctctaaatatatctcataaagtttattttatgccatttatatatcttgtttattgagaaatataattcaaatcagtgttttattcagaagtagataaagcactctttcgaaggtcttctaatattctaattttaatttaagagttctcttttgcttaaatataataaaaaagaatccttgttataaggattatgcaacatctcaaacaatgtaatatccattaagtggattaattgggcacaaaattatcttttagggggtaccttaaaaacttagcttgatagcaatgtagtaggacccctaataaaagtagatgatgcctttatgtacatcacctacttaaatgattcaaagtaattcgaaacccatttagtgttattttctgcaatatattcttctgcaagaattagtcttttgacaagttcttctttagttaatttcatatatttccttctcaggttatcaagattacggtttagttttattttatgaaattcaatatcctcgtaggaaattgaacgtttaaatgtattgtttttgctattctttttttgcttatgagttttactatgttggttgtaaatggattcatttaaaggttttaaaaatcaaaaagtacatcactatacctaaaagtgatgtacttaatatatattcaatgtgtgacattaaagacaaacaattactctgtatataaaaaagcacattcacttagccttaattttacagaatacttttgcctttttattttaaggcgatccattcgtaactttcccactctttaggcttcttatcatactttaaacgtccagtcgtacagaatgaagcaatcatccattgtataagattcatcttggcatatgggtcaatacactcttctatttttttcaattgataaccggtactatttttctgccaaattgtatataaacgaaaatgtgttgtcgtaacaagtctagcttttgttgtaacttgccattttgcaattttcgttaaatcctctttaacttttctatcatactcttgttttatgactttataactcttatctttattaattaatccattagaaaatgaaaaaggcatttgatgcacctcatagacagttccttcttcgtctcctaaaatgtttgattctactagaaatatattttttagttttaactgttccgttaattcttttccgctccgataaaaaggtttttttatcttctgaagcagaacaacctgtacaattaatccgataagtaacggatacgctagtataaacaccatattaataaacatatttgcaataagtacccctactagtgcgaatatcgtgaaataaatatacgtttctctttgatgaatgattctactattcaagctaacatacctccgttttgataaatagtgaaagcaacatacataattgctcctaataaaatagaacaagcccctggaaagctctgtattagctgtatttctttctttggtagttttgccccaaatatagaagcagcatgctccaattggtctttaatcgctcccgcaaaccctaaaattttaattaatcgatacacactagcaatccaaaagaatagtaaatgaaaagctgttaatgtaattgcggtaagcatagccgattcttctactacattgctaacatataaacctaccaccacaagcattttggtatcaccgggtgaagaaaatttaaatgtctctagcaataaaccacacactaaggccatgactagtacaattgcaatctctttccctgttcttgttccggcaaggtacgtgattcctatccccaatattaaaaatagtagatgccacatattcttcgtttttctatatttcaaatcagtaaatacatttaggaacatgtaacttagtaataatcccacaatatacagacccattttctttactcccctcttaatttcataaaaaatgctgtgtaaaaaagggacccccttttagagtagcccctcgtttatttttacatttattttttgttccaagaatctacatctgcattgcttgatgcttttgtgaatcgagctaggattgtatcatagccaccttgaattgctttccatacgaacgggccaattactaatacgataatcaccgctaacgcgattaacataccgttttctgatgataattgtgagtcttcattttttaaccaacttttcatttttgctaacattttatttcgtctcctttatatatcgattttaagaatctactaaaattagaacttatctatttaaatctttaattacttattccaagaatttacgtctgcattgcttgatgcttttgtgaatcgtgccaggatcgtatcataaccaccttggattgctttccatacaaacgggccaattactaatacgataatcaccgctaacgcgattaacataccgttttctgatgataattgtgagtcttcattttttaaccaattcttcattttggataacatatttaaattcccccttatctatttatttgagctatacgttacaaacatcattaatctaaaacttttattacttattccaagaatttacatcagcgttgtttgatgcttttgtaaatcgagctagaattgtatcatacccgccttgaattgctttccatacaaacgggccaattactaatacgataatcaccgctaacgcgattaacataccgttttctgatgatcaattagagttcgatagaactctttacttaggaatccctcacttctaaacgaagtgaaagtgggggtagttcaatacactagataaaataatagcaaaagataacaaaaaaagagtttatctcctcgtatcattactctttttaatcggatttgctataaccttctactacacattcttataaaaatactttacaataggcgatacttcaaaaaaaagaatcctgatttttaaaggattcttttttttgccctccttctcttttccccccttaacaaaccagattagctagccaaaacaggatatgcgaagggtagggggcaaagctggggtgtggaaagccttttgactatgtgtaattatttcactgcctctttaaattcttttccagctttaaaagcaggtgcttttgaagccgcgatttgcatttcttcacctgtttgtgggttacgtcctgtacgtgcagatctttcacgtatttcaaatgtaccaaaaccaagaatctgtactttctctccagttgctaacgcatttgttattgtatctaataatgcttgtgttgctgctgcagcatctttttgtgtaagttcagctttttctgctactacttttgttaattcagttttattcattttctgcacctcttaatatgtaattaggtgactattataacgtgtgtgtattcatgacgcaattatactgtacttagaaaaggccatagcaagagcaagaggacaatgtctgtgtaaaaggcataaggaggatattaattatcgctttaaactctgttcatatttctttacatcttccagagttttaaatgttaacacatcaaaaactcctttttcattcccacatacaacaacaaaaccatctgttgcttccaaaactctaccgacgccaccatctgtaagtgtaatactggtgatatgttttacgttcagtttatcttctttttgaatgtaagtagttatgggggttcctacaggaaatgcgtctgtgatttcttttgttgtatatgcgccatcatctactgattgagttttagttgtaatagaatcagtttgagtggcacatcctgttgaacatattaaaagaatgccagtaatcatacttacacatgctgtttttaccattcacaaaatcctcctataactgttcgtattgtcaacccatttagggtaacaaattatatatacgaagtttgttggattatatgagtcgtaattcaaaaaagatacaggtattttggcagaatgtgtttcaaacaaaaaaaagacaccctaaggtgcctttctgcgacttgaaccaacgtagtatggtattggatgccaatccaattattattttaccacattaagtaattttggttgttgagaaatataattcaaatctatatgttgtttatttttgcttcgttagcttttttgtaatggattcttcaacctgttcagatttacttttaatttcatcggtaattgctatcttgctaccctggtgcacacaataaaggtatttgttgcaccagaaccaaaaaagtaattaaatgtaaaaagttaaaaatcgaaacgtatgttattattatattgagaattataaattaaaggtggcatctggaagggaatagttataaatgaaaaaaataaaggggaagttatcttttagcattgatattataggttgtatcctttgcattataatgtttattataagtcttgttaattttagaacatgggtacacccatttttattccttatcttcggactaattttcttcattaatatagtaaatacccgtaagagaaaagggtgtaattcaaattaaaataaaaatgtatccgtataaccaaaaaacgctattctttttgtagaaatatacagagaggatggcattttttataaattttttgtttcaagatgaattccaatgatttgctaagggattatatcaatattttcctccttcacttttagaatagctggctagagagggagattttgtttaaagaaagggagattttgcgatgttacctgattatataaagatagctcatgagatagccaaaaaagcccatgctggacaagtagataaagcaggtatggattatatcaaacaccctgaggcggttgctagctttgtaaatacgaacgaagagaaggctactgcttatttgcatgatgttctggaagatacagagataactgctaatgatctgttaagtgctggtatacctcataacgtagttgaggcagtgcaggtactgacaaaagagaaatacacaccttattttgagtatttgtgcagagtgaaagaaaattctcttgcccgtacagttaaacttgcagacttaaaacataattctgatcgctcaagacttgctaggataacagataaagacctaaaacgattggagaagtatcgcaaagcgattcagtatttaggggaataaaagaaacagcaacttcttaagtgacaatttcttataatactagttgtttaaagaaactccttcttgcaatgttttaaggcatgtaagaacaattctctggttgttataaaataaaaaaataagagacgatattctaaaggagtctagaatatcgtctcttattataagccttaaaacgttaattcaggaatatgtaaatggttttttaataagtcccaagtctcatctagaatgggttttggtggtatgtaaataattgttccatcccgacctcttgttaaaataactctatatgcattgagtttaatttggaatggatcttcaacaccccattgatagtgttgccccttccaattcccattttgtagatatagatcatcatcccaatgaacaagcgtcatatctagttcaagaccctgtgtttggaattcagttgagctgtagttgagcgctctacaatagtattgggattcggcatagttaaagtattgagcgatcttactagggcgttcatatcgttcatctcttggtagaacagggacttctttttgatgatcagcgccaccagcacagacaacgccaactgtttttgtatcatcctgataaagctgatgtaaagtgtgtttggctttggctaaatcacgcgtaataaaaagttgataatgttcttttggtagcttatgaataagctgttttgtttgttcaaaattagcatctaataaggtattaataattttatagtattttaaagctgcatgagcacggaaagatgagtttaaatgtagctgagaatgagttctataatgtgctgcatttgtaaataaagaattaggatgtttagagtgaacagtcacgttttttccagcgatcgcagtattccatagagcgagaccgccttcttcaccagaatagatctcttgtccgtcaccaattaaaccaattgttacactccacggcttattatttgttgtgacattcattataatatccggttcgcttaagttttgaggttctcgatttcttcgagtgagtgattggtcgactttttttgcatcccatgctcgttgggcctcatcaaaaatgattatttgttcttttggaatcattctcttttcaaggaaatccattttatatccatatagaccttgtacgaaggttctatttttcagcgtgtcttgtaatacgtctactaatggtccattaccagataaataaactgtatttttcatctcgtgtgcaatgatcagacctaaatatgttttacctgctcccggctcaccagatactaaaatgagatgatgggtatttgtacgttgagcttcttcaataattgagcgtacagtttgttgtacttctggaaagttactgcttgatacagctttaatgtcagggagcggttcattatttaaaatagaacgagcagcttctagcatagaaggtgagggttcatagacaccattgattacttcctctagcgttaaagttggtgtttctgttttatttaatattcgtttaataatactttccaatccatcaactgttgaaagagttacttgatactctttttggaaaatccagcgttcgccttcatagtttgtaagcagtaaaacacctatgacttgcatgttagattgttgaatagctgagtgataatgttcaagatcacgcatataaagagatgtttggatatattcagaaggtgaaacgctattataacttttacattcgaggactatcagataaccattgatcagtaaaagtacatctgggcgacgaccgcctccgcgtaaaatctcatattcaaaaataagtgatgcatctaaattagaaaatcgattaaataaatcttgtagtttattataactatccatccatgctctcttttgagaatctatttttggatcatttgtattgtttttataaacatgagctaacaattgtttaataaaaaactgtacatctaattgcttaaattgttcaatagttccagtccagccatagttcaagataaaggcctccttgtaatatggttttatatatgaatatctatattatacaaaataaaataaatagtttggaataagaaaagagttaaaatatatttttcctaaagtattgtgtttcaaagctttgtattattacaatcgataagaattcaacttattttatagcaatcgaacagcttaaaaaagaaaaagtataaatgttgggatgcaacttaggtaacggaagtacttgaatagcatagtagaaaaggatcttcgctttatatagagacgaatttggtctattttaaacgattttttagcggaaagaaatattgattatatttatgtatttgttatatgttatatataaatatatatttttaaaatatataggaagtgtgttttaatgatgaaaaaactgtgtttagtcacatttgttttgtttgtaatactaatagtattctctgtttttttagaccctttaagaggatttataggaaatgggattaattatattagactaattttatactgcatcattagtcttttattggacataataatagctaattttctagtaaagacaatcaaatggatacgtaaaaaaattttaaataagaaaacaaaagaaatggagttatttgcatggacagggggaatacaagatattgaagctgaattgcaattaataataggaaattctattgtttcaaaagatattattgataatattggtattattaaaaaacgaatacaacgatattttcatagagatataaataaattaaaaagatttagagcatatttaaatgtagtggaaaaagatagtacagtgctagtatttcaaacatttatattcgcaatattatcatccgcatttgctagtatggtagtaacaggaagaattgttgacgttacaaaatacctccttccaaaaatggatagtggactttctcaagtattctattatggactaggtactgctttagtattctttatcattggtattatgattgcatatcttatgagtcatactgataaaactagggttagaataatacaagaggtaatcgatatgtgtattgacgaacttgaaaatgagaagaaatgttctgttaaaaagaatttatagattaaatcaataaaaagttcctatatattagaggtgctttttatttataagattaaataaaaatatccagtattttttttaaatattattgtacataatagtaaatatttaccgactgaaatagactttgatgttcatgaattagtaaaaatggttaatttttatttataacaaaaaggacctaaatggtccttttgttttgattaaataaaatattgattttatctcacttatcaaaaaatgggttctcagattgttttgtatcaatttttaagagtgtggttaatatatttgtatttaaagttgatagaatgtaacagcaagccccttgggaattctgatgattttttgtttgtgaattttattttttacataaacaaatccagagacagcaaagcaagaaagtgaatccagcctttccaaaagggaaaccctaggtttatacaaagataacagcaagcctgtacaaaagggatcaactattaaaaagagaaataaaaaagaacaaagataattttgataattatcaaggaacaattaccaaatcattggaatttaatcaatttaagtctttaatgaagctaatgaattttatactcaatttactgttggtagatggaataaaagcaatgaaacagatttataaaaaaatttgcagaagaaacaattgaaaatgtaagatataaaaatatcccagaggataagattagaggatatgtttatagatcactagaaaatatttgtgatcactcagattataagcggtctgaggaattctcagcgtatcaagaggtgatgggggaattttcaagtagtggaattaatgaaaataaactaaattctggattacataaacgtattgaatttaataacaataagttaccatattgaagagaataaagaatagcttttaggagactggaaaagctctgtattggatttaaaatattagtctaaattaaatgtttaagagtatcaaagattcaagacggagtgaattctaatttttcttaatatggaaaatgaaaattgctattggaagaattatttttaaattaatcggcttatagcgttctttttatttgaattgaaatactatatgattatattaataattgaatggatatttaggaggttcgtttatggatataaaagaattaataaatataatgtgtgaaaatttaccagattcattgcaagaacctgtgcaagaggtggttgaaatcggtggtggagctgctcctgtcattgggtccatattgaatcattttaaatttaaaaagataaataaagaattaaataatctaaaaggaaaaatagaaaaaattgcaggaaagttagatcaaagtgaaaatgaagtatttttgaaacaggaagtcttccctattgttcttaatagaataatgaatgatgaacaagcagaaaagataaagattatattgaatggcttcgaatacataattgataatgatattctagattttgataaaatatttcattactatgatgtcttagctgaaatgaggttaagtgagattgttcaccttactgaaaaatatgttgtcccaatggaaatgatgaaaaatccggaaaagatgaagttaaatattcaattaaaaatggactacacggaagaagaaaaagaagcagaaaaagaaagggaagatttaaagaggtacatggataataagttatttaggcttggaatcctccaatatgtaaaggagcgggttgacgaaccatttcaggatgattacatacaaacaggtatgccttatcagtggcagtctcctgtacctgataaatatgaaataaatatagaaaaatataaattgagtaattttggaaaaagatttatcaagtttttcggtgaggaagaataaaaagaccaatttcggtctttttatttttcttgaaagaaaggcattgtgtttttgtatcaattttcttttttaattcctttaatttattttgaatggtagtctgtgtttctgtgcaattttgtgattcgtgaaaggaaagagtgtataaaaccccttgtaattcatcgtattttttcatatgtctttagataatcataatgtgcacttagtagaggaccaaagtctgcaggaggatagtcagctaatcatctttttacgattccaaagtcttcgtaaatctttatatgctgtgtcgataaacaaaaaggtttgtatttatcattagttatgatttgatctcgtctacaatataaaattttttgccttcagaagcatcttcttcaataagagaaacataatcattaatctttaaagttcctccagaatgattaaatatagtagcatgctcttttatgtggtggatggggcaattatcatgatacgattactttaaataattaatatatataaaggagagtaaacatgcctatctataacaaattagtaagagataatattttagaaattatcaaagccgagggtctaagctacaacgcaagaatactcacacctgatgagttactaatggaaataaaaacaaaaatgatagaggaagcacatgagtttaaggaagctgttgagaaaaaggaagctgttgaagaacttgcagatattttagaattaattcatgcttcattgggagcttatggagtaaagcttgaagagttggaagtgattcgtaaggagaaaaaagaaaagcgaggtggttttgagaaagctatctaccttattgatgtacaggactaataattactaagggggcattgcatgaataatttccttgagaatgaccaaacattagaatctaaatttcgatctgtttacttgtttggaagaaatgtagctacatataaatttgcttttgcaaagacactattagagctagggaatagtaataatagttttgtaagccatgaggagttgtcgccgatatttgctaagtatatgttagagcatattgggaatggcaaaaggcaaattactagtgcatcatccaagtttattaatgcgctagaattgtataataaacagaaaattacatgggaacagttgttgcaagttactgaaaaagtaggattcaataatgtaatagatgcttttcataacattcctaatggggagcttaatacagtgttctatgaaaagtctgttcagggaaaaacgttaggtatcacattaactgatagtatttatatcttgaatgaaagtgaacaaagagcgaatttgttcaatgagattgaaggtagatggaacttagtagaaagtgcttggacggaaagaaatccaaagttagaagttagattcgatggggagcttgagcaattcttctttttgaagtctattacaccagagaggtatttacactctcacgaacgtgtaaatttaacgtttgtaagaaaaccgctaaatgggtatcaaaaaggaaaatgtttttattgttataaaagtatttctattgagagtggtcaaccaaatacctgtgatgtagatcattttttaccgctctctgttcaatatttatccacggtggatatggatttaaatggtgtatggaatcttgtattaacttgtcaagaatgtaataggggggaacacaatggcaaatttgctagagtaccacatgaatctttgttagaacgcttatataagcgtaatgaatatctaattgaaagtaatcatccgcttaaagaaacaatcatcatgaaaacgggaaagaatagtaagctaagagcagaatttttaaaagcaacttttaattatgcttcttctattaaaggttctgaatgggtgcctaaaaaatactacgatattggattttaggatagatgaatacattaacttctaagatttataaatgtagacaacctgcatttataaatcttaattgaaagaatggattaatgaatcttcaagagatttgtaaggtgaagctcagttagatgaaatgtatgggcaattaagaaagtggtaatgaacaaattatctaaatagtactttatatctctataatctatatataataaatgattatatctttaaaaaaggtggatagtattattagaacaaataccaaatttgactaacgactaggagatctataatgcatttgtattttgggcaagtaaagcaattatttagattaactccaaatgaaataaaggatttattaatagaaggattaaagtcaaatgcttttgctaaagaagagtttagtgagcaagaagtggacacttggggaatttctgtccaaaaacttgtgcagcgacttaatgaaggagatcttggagaaatatcaatcgtattagaatattttattcctggaaatctattaagacttgatgcggttttaattggctataattctcaatcgcaattacatgtaatgattgttgaattaaaggaatggggaaaaatcattggttcacccgatccacaccatgttgatattggtgtaagtcgacaaccaatccgacagcatccagcagcacagttaaatcactatgtaacgtctctgagatgttatcatagtgaacttcaaaagaaaaatgctattcaattaagtacaatgagttatttaccgaacttaactgaaaaaaatcggctatttgagccaccccataccatttatgaagcaaactatttgagatgttgttttggcaaagatgaagagaagaaattatgctcgttcttaaaagaatcatttgtgaacaaacctgttgcaaagcaggacaatgagttatttactaatggtatctattcaatgagtgaagctagtcttgcaggtatttctaaagcattacaaggagagcgatttgtagcacttttagatgaacaacgagatgtgaaaattaaagcgatggagcttattaaacatgcttttcaaaacaaccataagctagtgctagtcattcaaggtaatgcaggcacaggtaagacaatattaggtttagaactcattcgacaatacataaaaaggtatccgttcacttattttggtacaattcctcaaacacttagaacagttattgatggactaaataaagatcatgctatggaacatggattagatgaaccagctaaattgccaacggttaacgcaatattaaagttaagaaatagaggacatattgttgtaatagatgagtcacatcgattaacagatgttcaagatgtaatgagcaatctatgttcaagattccaaattattgttctactacaggatgataatcagcgtataaaaattactgaacaaggcacagtcgataatattcgtagagctttagggtatactcccgaaatactttcactgcaaactcagcaacgagcaaaaaatagcggtacattcattcagaatgtagatgaatttttaacaggagacttatctaagagtgtagatttgaaaaaatatgatttacaagtatttgattcattacatgacattgatactgtacttaaagataaaatgacacaaggatatagtgtaaaatggctggctccgttttgttgggattggaagaagaaaattgatgatattcgtatttgggatggacagacccaatttgtaaaagcatggaatccgacgttagctgcgcaatatgaatggtataaacaaacagctgttaatcatttagagcaagtaggatgtatttatacggctcaaggcttggagtttgattatgtaggtctaatcttttgggatgatctatattacgattctacaagtaagctatggaaagtcacattaaaggataattacgacaattcgtttataaatgaaatagcaagagcttatggtggtacatttaataaatataatagaacagtcatttataatggacaacaatatcaaatcgataattttgtagaaaatgtgaacgcaacaaatgttgtaagtgaattagtaatgaacatatacagagtgcttttatctagaggtaaaaaaggtttgtatatttggtttaaagatgtaaaaacaaaattgtattttatgcagcaatttagtcaaagaaattaatggattatggtgtaaaaatgaatgaagttaaagaattaacagaggaagttatcttttagcattgatattataggttgtatcctttgcattataatgcttattataagtcttgttaattttagaacatgggtgcatccttttctattctttatctgcggactaattttcttcattaatacagtatatacccgtaaaggaaaagggcgtaattaaaataaaattgtatccgtataaccaaaaaaagctattctttttgtagaaatatacagagaggatggcattttttataaattttttgtttcaagatgaactccaatgatttgctgagggattatatcaatattttcctccttcacttttagaacagcttgctagaggggaagattttgtttgaagaaagggagattttgcgatgttatctgattatataaagatagctcatgagatagctaaaaaagcacatggtggacaagtagataaagcgggtgtggactatatcaaacatcctgaggcagttgctagctttgtaaatacggccgaagagaaagctactgcttatttacatgatgttcttgaagatactgagataacaactgttgatacgtcaatattattagaaagataggtgattatatgattcgtgaagctgagccaaaggacagtaatgtaattggaaatctatataagaaattagcaccccatagtaaaaacattaagattttaccagaaagaattgaacaaataagaaaggattctaataattttttgtttgtttatgaggaaaattgtaacgttataggaagtatttttatgactttttgtctggaccctggatatcaatttagaccatataccgttttagagtatgtggttgtaaatgaagattttcgaggcaaaggaatagggaggaaattattggagcatgtagagcagatgtcaattgcaagggaatctacaagaattatcttattaagtagtgcaactagaacagaagcacataaatttttcgataaaaatggttataatggaactataagtaaggggtttaagaagtatatacctattaattaagtttaatgaataagaatcattcgtagttatatggatttgaggagatgattttttctacatcatttgtgatataatacgcccccaaaacacttttcatttttggaataaatacacgtgtatattttcaatttcatatataagtacggaaaagttgtagttttaattgaaactacaacttttaattttaatttcacttttataggagaggggagatgaagtgagctggaataaaattgttttagtacatttgctttattttaaaagtagtttgagggaagagggtaatttgataaatacactatgttgttcatttccttcttgattcatacctgcttgataagatgtaaagcctttatacgtttttcttttccattgccataagccattactttgatcgaattcaccatagtaatgattgtaatccagtttgttcccagtgtttttattaaaattattgttaataaaaatacggctattacctgcatagatttggttattggtaattacattgttccgggtatcgtaatttaattcgatttggccactctcttgatcttttgtatcatttttataaatcacattgttcgtaatcgtattattttcagcatatccttgctgactatcatatccaccaattgcaatgccactcatgatattattggatattgtattgtccctaacagtaatacggcttgcgctttttcctgcatgttcgctagctacttcaataccgagatcattttcatagctttgattttgctcaaggataatttgcttcccaccatccacataaataccatcagctgaatattcattataactagtattattgatggatgaattgtgatggacaatgttattacgaacaactccatttcgtgcctgatctaaagcagctactggagatacgccttcatgtccaatcagtacaattccaatattgttgttatcatgcactttgttattggtaacttcaaaagaatctacatttccattcacagcaattgcttcactcaatcctaatttcaaatttgctacttcgttattatcaatgacaatatgatttaaattattttgtgcactagatgaagtaccgtatacagcaatgccatgtgcatttccattctttacattcgcttcaatgtgatggatataattatttctaatatcaatgtaacttccttttccagtgatataaataccaataggggtttcgttaactttcgttgactttaagttacgaaattctaatccttttacttgaatatagtttttgtcttctattgtaaataacccatcatcttctaacttgactttagaaccatcgagaatgactttttcatcttgataactttgaaaagtaatgggtgcgcctgaggcaccagaatgagcgacacgaactttttggttataaactccgcctcttatgtagattgtacttccttctgttgcgacattagcagctttttgaatggtagcgaaaggttgatctaatgtgccgggattgaggtcatttcctgttggagatacatagtaatttgtaacagaaattccattgctattggattgtgcaaaggtagaggtagggagtgcgaaaattaacatactgaaagaaagtataaagataaaaagcgatttttttaatgagggaaatattgtttgatatttcatcatgatcctccttctttattaagcattccttctcaactatatagttaaaactgacgatttatatcttgtatcaataaaaaaacaggaatgtattgtgggttaagggacatcaactcctatggtctacgtcttctatctgaaactaaatttttaataattcatggtttttcgtataaaatcaaatcatatatacgtgtacttaaagaaatatggatattaaaatcggtagacgagggaatgagagatactgatactaattttaaggagagttattcaaaatatgttttctattcaattaaagtttccctgtgtatcatgttaactgttgtactaatttgattggtaagattaacagatatttatttaaagtgggggtggttcaataaatctgaaattaacattgtttaatatgagtgtctgaaaaaatttatcaagttttaatattcggaaaataatttatataaacaagtatgttatggtaacctttaataaaagggggtagcgtatatgaatgttgaaattatttctaaagaagaaatcacaaaattattaaacgactggtatcaagctataatttcacaaagtgtattacagtctaatgaaataaaagaagagattgcagataaaatcaataatattaaggaagaccaaacaatattagtctactatgctttattgaatgcacggtataatctgctaattcgtgatatggatagttcaaaagatattttggataaaattgagccgttacaagagcctacagaaacatttttagagtactatcatcatttatttaaagcaatttatgctactaatacagcaaaccatagtgaagcaagaatgcaatttgaagaagctgaaaaatatttagagtacatgcatgatgaaatcgaaaaagctgaatttaattattggcttgcagttcattactatcacatattgaaaccaatcctagcagttcaattggctacaaaggcgaatgaagtattttcaattagtccagggtatgaattaaaaactgcagcatgcttaaatactttagggatggcacacattcgactaaatgaattcgaaagtgcagaggaatatttactttcagcactaggtaccttccaaaaatctaatgatgaacttcttattaaacgagtcaagcataatttaggacttttatatgcaagtcaaaacatgtcagagttagcaattaagcatttagaggaatcactagaaaacaacgctaaaacgatgtttcttttagcaagagaacattttaagttaggtcataatcataatgctaatgaatatattgagaatggctataagattagtgacttatgttatcgtcatcattttcaaattttaaaagcagtacataactatgcaccacaagaagaattagaaaaggtggtcatggaaggtatttcgtattttgaaaaagaagaattatatgattgggtaaaagaatatgcttatcttttaggtaatatattctatggttcagaaaatcacgaaaaagccagcaagtatttacacatcgctttagatgcagacaaaaagagtatagaaagaagggcgctaaaatgaaaaaagcaatcttattaatgatgatgttatccgctgtttttacttttggtcttactaatgtaaaagacgtatcacaaaatgaaactattgaagtgtttatggatcatggagagcatatttaattatctaaaaaaagagggagctgcgagcaccctcttttttaattatgaacatattaatttagaaataacataagtagcagtaggaatgaaaaatataagggataatgttccatagtaccaaatacagtctgatttacattcttaaataccaaaccatacattcttctttacacccaatgcttttaagggtggagttgcggctagaacgattgaaccgcttctatttacatcaccgactactgctaactttgtatgtatagggtctaatccctttacttgaatataatttttgtcttctattgtaaataatccatcatcttctaatttgaccttagaatcatcgagaatgactttttcatcctggtaattttgaaaagtaatgggtgcgcctgagacaccagaacgagtgacacgaaccttttggttataaactccgcctcttatgtagatagtactttcttctttagtgacgttagcagccttttgaatggtagcaaaaggttgatctaatgtaccgggattgaggtcatttcctgttggagatacatagtaatttgtaacagaaattacattgttattggattgtgcaatggtagagggagggagtgtgaaaattaacatactgaaagaaaggataaagataaaaagagatttttttaataagggaaataaggtttgatatttcatcatgatcctccttctttttttaggcattccttctcaactatatagttaaaactgacgatctatatattgtatcaataaaaataatgaatttatattctggggatgatgtgaaaagttcgtactcgcttgtgttatcgttccaaataaagtgatttttaaagtttacatgaaggggaaatccatcctgcagctattttatttgagaagaattgcagattcgtattgaataaaaagatttaagtattttgaatttattgaattgagggatttataaaatcgtatatgaaaaattaaaagatctaatggttattataagcgcagatttatatacgctcataactgttttattacgaatgaaacggtttgtaatggttttcgtgtagactatcctttggttctccaaatattctcagtgataataaacttaccttatgtttctcaggaatattattttttaaaataatcataatcaaatctatatttttttcacaaaaaatccagttgtaagagcgaatgtaatttatctttgacacctagataagtcttcacatttaaaatgaacgagtctactatactaatcccaaccccttttgagtatttttatctatattaaaaattcaactgaattaaagatataaaaattcccttatattcgtttgatattctgttagcatttattttagtttaagaaggagattctacgatgttttgaatataattgcggtaaaggatttttgttttatagtttatgggaaatgttatttttaaaataacagattttattaaaaacgtttattttattgggttttattagtttatctgtatttattttttataaagagatttttattttttaataaaagagttgcgttgggaatttaaaaagagtatagtgagtgatatagaaggtggtatacaaaaagtagatgaggaggaaaaataatgaaaaaaaacgatggtcaaaaacctgttaaacatttattcattaaattcaatgatgttaatgaaggatttcctaaggttgttagtacgatcagacaacatgaaattactggtttaaacaataatggggaactgatttgggggcaatttacaagtcgagatcaagcgggtatctcattgaagcacaagcaagacattgaacaacaattagctaacaatatgaccaccagagtaatcttctatagccgtaaagctaaattattatacgaagctgaacttgtgggaatatatgatagagattatgccggtgctgctcaaccagaatttgtaaaattaatccctgagtattatcgacatctagcaggggttactcatataacagctaaaaatccaatgataatctattcgtattttcacattaaagggttaaggcctatttcacttacaaataatatcgaacatatttatcattatgataaacaagtacctattttgaatgtaaaaggaatgcaggctttactttatgtttctttaaatgaccaatatgaaagctcaattacttccataaaaattactgataatgatttagtagtagaagggaaaaaacttgagctaagtacagattctgatatatcagctaataaaataataaagagaggatcatctattcgaaatcgatatggtgttaagcgagattatgtcgctgaagcagatgttaaagggagaataggtgacgctgctgaagaattagtattaaaatacgaaaaagagagccttaccaatatgggattttcacatttggcggaaaaagtacatcgcatatctcaaattgaaggtgatggtcttggatatgatattctatcttatgagattgatgggaaagagaagtatattgaagtaaaaggtacaattaatgaagcgaatattccatttcctatctcgagtagcgaagtgcaattttcagaagaaaaaactgaggcattttatatttatcgagtatttgggttgaaaacagatacaccacaactaaaaatttatcaaggtagtattagtgcaaattttaatcttgagtcaatcaattatttagctgaattgaaatagtttatttgagattattggtagtaaaaggatacaataattgttcggaatacatcgtttgtaataatctgatatcagtttactttaaattagacatgttaatactactttaaatttaattttggctataaaacaaacatctagtcatctttatattaaacttaaatattgtaaattacctcaattagatttccttctttttggggtaattgaaatagtaaatatttaattaaacagaaagatttattctgagatatattaaagaatttttaattcttggttttatttgtaatgaaatgttgaaggtgttaaaaagtatagaatacaagtgttgtataatacctatggtgaaattcccctttggtttttgcatgaggagtacttaataaataataaaatactttattagtgattgtatgtctcttattataaacacttaattattaccctatgtattttataaaaacaagggagagaggaatccaaggaaataagaaaaactacttggtaagcatataaaagaggagcttttataatggaagaagaaagtaatacaaaaaaaataattaaaaatagttggagagtatccagtgtaattttatcatttatatgtataaatatttttttgacaatattgagaaatgaaatgcatgataaaattccgtcagattacttaagtttttgggtaaagggagtattatatgttcttattaccataccattaatactattttttgtttcatatattattactagtatttctaatgctagaatcagaagagaaacattttttaggctatctgattatattatattcaccgtatcattgagcataataataaattattggtttgtaaacacacctgttagcatgtggacaggaaatgttctttcagatttgttcgatataagcatggttttttcatgttgcataattttatattttactggtgaaattttagcgcgaatacaaaaatctaaacaagagaagaaagagaaaatagccaaaagtcttcaaaaagaaaacaaaatagaagcctattacaactctgaatatccgataaatgatacagagcaggatgctttaaatagagcgtcttttgcagaaaaaatagctaattcattagttaaaagtggagaagacagcttaacgatggggattttgggtaattggggaagtggtaaaagttcagtatataatttaattaaagagaaaagtgataagaatcatgtaatatttatagagtttaaaccatggtattttggtgaaaataatcatgatattattcggctttacttattggagtttttggaaggaatcaaaaaagttgaaggatataatcctgaaattggtaaagcgataaaaaagtatgctgatatcttatcctctgttagtttgcgtggttttggagcgacactctcatttaaggaactagtagatagatttaaaccaggtcagagtacggatagtttatctgatttaaaaaaggaaattgaaatgttgcttaaagattatccaaaaagaatagtcgtatatattgatgatattgatcgactagaggggtcagaaattagaatgatttttaagctagtacgtttggtagctgattttccaaaggtaacttatatattagctttagatgaggaagttgtccaaaaatctttatcatcagtttatcaatttgaagaaaaagggaatttagaagatgcaaaaaaatatatagagaaatttatacaaatacctatttatttaccgaagccagattttattgatttatataacttatgcaaaaaacaattaaataacattattgaggaaaataatattttaaatgaggaatatactgaaattatagatagcttaatagagcaaaaattgtcattaagagacctatctagatactttaatttggtgaagttttatttaccatttttaaaagaagaagtgaacgttaaggatttactgtatttaatcttaattcaagttagttcaccggaattgtatcaatatatatatactaataaattattgtttataaataattacaagtttgaattagacgatgaatttaaagcgttacccagattaaatgaatatcaggggatactatgcacaattttcccttatgcaacacgtctatttggaggtgcatttgaaggagaaatggcaaataaaaaagaatgggaaaaggaaaagagggtttgctcagacaagtattttaaccattattttatgtatagtagccctagagatgctatttctcaaaatgaattaagtaatttcattagtttgattaaagaaaaagatctaactgaaatacaaacaatatatttagatttaataaaagaatatagtgctaaagaagtaaatgagaagttggaacatagattgtcggaggtagatgagtgtatagaaaaaatatttacacttcttttgaaatcataccaagaattacataatataagtgggaatagaaacgccaaagaaagtataatttacttagcgcagttgatagcaaaaaaaatatattcgaaagggcgcgaaattcctgtagagtattgggaaaattccaatattctattcatgttaaagatttataattatttacataataattataatttgaaaattttaaagttagcaattaaaaatgcatatgaaaaaatttctgaagttagttattttaaagtgtttgatgaaattgatgctaaagaagttttttctaaatggaaagactttagtgatcaagaaggcataaaaaagaaagttaaaaattggattgatacaaaagaagattttgaagaatttttaaattattattttagtgatataaacagtgaaaaaatagtaaaagacaaggaaattttaattcatgtatttgttgcatctactcaatatttaagtgataaaatattacaagaatattttgatcagtatcattctcctaagacagaagtagagtggggacaatatattgaaaaaaatggagctggaaatattggactgtttctattaggtaaaaacaatttatttgaatatatttttagtgctattgagggtttccacgtttcaagtatgaagaatagttatatggtagagctgccaaaatatatatccatgggagtaaaactaattaaaaagtttggtaataatgaacaaataatgaaaatagaaagtttattagtggaaataaaagaatataatgatttcataaaagaacaattagatcttcaatttgaaagataggaacataaaaataggtaaaggggttattttgaatttatttataatagggtttatttaaattaatattcctatatattttaaaaaagttgtgaatggtcttatctccatcaattggacagtattaattaaagttattttctatttgtgagttgaatatttcttattattcagtaacgaaagtttatttaaataaaaatgaagtacttgatcacatttatattggtaatttttagatggattaaaaaatattcaatctctattaaattatttaaaaaggttccaaattctttcttagaatagaatttggaacctctttaaactacttcatttttgcgggtgtttcaacttttattccattaggaaatatgacgcttttaaaaagtatattctcggtttgggaatatactttaaaataagggcgaatagtagaatctgggttaagaggagctgatattaaattattatcgttattactaatcaccacgtaattcatattgtctttggtaaatgttaaataaattttttgctcttttgcagtttttattcctaattggtgggctgagagtccaaaaaatatgaatagggtaataagtgttaaatatttataagaatgtaaaggcgtagcgatatgccttagtacattttgaatctttttaggtaaaagaccatagaaagcaaagatcattaaagaaccaaaaaataaaaattgtgtaccccaatggttttgtaagtcaaatattaatgaaagcgaaatatacatagctattaatataatgattgtagaatgtatttggttgtataatgcctttgaaggtagtgtgaatttgaatggtaaaacccagctgaaaagaataacaaaataccaaaataaagctccagctatgtatgagaaaatacctaaaaagaaatgtattaagtcatttgtgtcacacttaagaaaggctagcgaatttaagtgaaaatactgatgatatccacctttaaaaagagcggcaaatgaataagataaaaaagttaacaatagcactataatggcagcttgggtcaaaaatatagatgaatccttactttcttctactcttgaaggcgaacgatcaaatttccttgtcttagaaagtaatgttaaacgtttgcgatgtaatctttttctcaaaataattcctcctgtatatatttatatataaatattaaatttttcgattatattagtcaaagagaaagtttatatttttaaacaattgttctaatggataagtaatactaatggttttacaacaaacataacgtagttaatagtttaaaatttttatatcatgtaagattggacgggttaatcaatcaaaatataaaatgttttaaactgaatatattatttaaacatagattgttgtaattagcttctgaagatattgttataatattcccgataatacatcacccgttttatatcgctctctgtgcaatatttatcaactgaagacatggatttgaatggtgtatggaatctagtattaacttgtcaaaaatgtaatagggacgaacataatggtaaatttattagagcaccgcatgaagctctgttagagcggctaaataaacggaatgaatatctaattgaaagtaaccatcctcttaaggaaacaattatcatgaaaaaagggtaatatagtaaggtgagtgcgggtttttttaaaacaatttttgattatgcatcgtctattaaaggttctggatggatgcctaaacaatattacgatattggattttaggatataaaaataagtgaacttatacttattaagtgaaaattagttttttattttctttagaatagattgttgattttttccactaccgaaaaacaacttagttagaatcattttcaatagtatgttgtgccaatctaaactgcaagttaataaggaggagaaatatgaaacgaggtataaaatttttaccaaaaagactcttaatagagttcaataatgcagcgaaaagagaaaaaagaaaccaatatattgagccatcaatcttagcttcttgccctgatggatataatttccctattgagtacctgatgatacataatgttgttgatgaagttagaactcgagtttatttgggaccagaaattggttttgctttattagatatgtcaatggatcgtttttcaacgattccaatagctgtatatgatcaaaatggtgacattaaatttcctacagaatctgaaattcgtaaaaaaatgccttacaatggaaaagaatggatcgaaacgaaatataagaaagtttatagggggaatcagaaagcttttcgtaaaaaagtattagctgcgtatgagaatcaatgtgcggtttgtggccaatctaatcctatttttttacgtgcagctcatattaaagatgctgcaaaaggaggagaggaagtcattgaaaatggcatttgtttatgtacgaatcatgaaatagcatttgaccgtggagacttgaaaatctgtgaagatggaactattcttcttaattatgaagactctagtataaacagagaaaaaattagattgccaatacagcaaaaagagtggccttcgaaggaattattgaagtggaagtttgataaaatcaaaaattgatacaatacccattctactgtggactgtattattggtgaagaaaaataagaaattggaattttaaataatggtttgtgatgatataaaatatggtaggaatatatgccgatagtagtataaatatttcttttattataatagacaattagaaataagaaagccgcgattctaaaattgcggctttctttagtcatatagagtttttttctatattaattgtgattttagtcctgcgattcttagggacttttttgggttcagacgttatctctgttttaactaattttttacactccatataaagtttcgaagaagaatcatatacgtaaaatattttttcgcttgattctaattcattgtagaagactaatctattctcatccatctgatagtcgtattttaagttatctatctctctaaatgtttcctcagtaatgggacaaatatcatattcatatttggtagctttagctgtagtaattttgtgaagtgtaaagaaataaaataagctgaatagaaaagcaacaagtggcatattccataagaaatctaaatacttttcatttacaatatatccccatgaagctgaggagaaaaataatatactagttaatacatgaaaaataaataaattgaaatgccatttggttttaataattcttttaaataattttattggtatgagtgtgatagaaaaatatataaataaagagaaacatattagtgcatttaaaatgaataagctagaattacgatattcatgtaaagctggataaagaagaatgccataaataaaatacacaatggttcccataagtataccgatggtataaaaccaaaatttcagtttaaattgattagatttatctttaaaataattatcaagcgggcttgtggttattacattaataaattgattaataatgtatatgaaagcagctgtaattgcacctagaagtgccacgatgactggggaaaatttacttatggtttcaatagataattcgctaaacataccactttttcactcctttaactttttatcaatataatatattataacaattattatatttaaccggtagcggtttttggtaattatcaatataagaaattttgtgttattaatttcatgtggtattaattggaaaatgaatgtaaaaagcaagacataataacactgtttatttataatgtagtctcttcgattcaagaaaataataaagttttctgatatagtatcatgtttttatgtggatgaagcgaaatagagtttcttgttgtggacagttatagacacaaaattcttaatagttttgactcaataaaattaaaatgaaatgactaaatgaagtttttgtagaattgttcttttgaagtgaaaaacttctaaaaagtgaacacaaaatgtataaaaacaataaagcctaaaataaataataggaagatattcatgaatagaagatattatcttggtatgttacatgcttaataattaaatgtagaatttgaatttataaaaattaattctttatttataattaaaaacctaaaactgatattcaaacgagatgtcttagatattttagaaacaggtcaaacaaataaaacattagatttcaaaataaaaattaatgaaagcatgtaaatatttatagcttttataagtttaatagaggagtaatgaatctgattcagtataaattaagcgttagtaaattaggaatagtttaaactttattatcaattgttttggacattgattttaaagattgatcttttctttataataaagaattggtcttctaataaggatatattttcctggttagtgtatgataaataggatattatagtgaattattttataaaaagatactgcatttaaaaggaaaggagagggaataatgggtttcttagatgatattttcggtaaaaaaaagttagtaaaagaaatagtgtaaatgtcaagataaacatgtacattttcgcttgtttaagcatgtacaaaatcaatcattttctttgctaaaatgttcttttgaagaaaatttagccataaaaaatgcacctccaattgttagactgtgtctaacaattggggtgcacttcaatcaattggacagctcttgtttttgtaaaatcttaataactatttccaactctatattctgcattaaacaataaaaattatcaccagattgtttattatctataagacattcaattgtttgaagaatatgcccattcacaaataaagtacctttatctattacaatttcttttgaaattgaatttgctctctctgttctctttgataacaataatttactttcagttaaaataacatcttgtgaaatgttttgaaaacctataatcctcttcttaaaatctatcacttcttgtaagctaatttctgttttatatctacccaattcaattggtaattcacctgttatatagttctcaaattctatttcttttttctttactatgaaattgtgtataggaacccatgatgattctactttatttattcttggaatatcacttgtatttttctttaaatccaattcgaaaagaattctattttcaaaaatcttagaagaaaccattttacaatacggctcttcataataataatttgaggtagctattaattgtgtctctaattcacgaaattcattattaatattgttattttcaaattgaaacacttcttgccttctttcactcaaaataggatttgtcaaaaaattagttacttctgacacaacagaaaacggtgtttttaccaccatggaatttactctattactttgactcatttcagaaaatacattctctttctccttctctttctcttttttttgttttttctttgaaactaattgctcatttaaatttttaatcttataaattttatgccccatattattaccagaccatggcttattcatcagtaacacacatcccatccgatgaatttataactaaacccatatcagttatatacactcattgttaatattatgtatgttttatcaaaacagaaaagacattaccttctataaagaaggtaatgtctttttctatttattaaacaataccagctcgtacttgttgtacttgcaacacttttagtgtaagatctaacacaattttttcacgtaaagcatcaaatgttgcctctaacgttgttgggcatggagaaaaatctaattcataaaaattagcactgattatttcaacagtaggttgctcattataaactacatgattttcgaagaaatatttatccaaacgaggtaaatcgccatccttaggattaataaaatgagaggctgtatctgaagaagctgcaattaaaggtaaagtgaaaaaatcaccttctgttaaatctgcaaatccagaaaaaggaacattagcaatacgatcatataaagctgcattacattcaccagatgcatattcaatatttttacgaatataacctgatacaaataattttgctcttgtaacacgacgataaggcgtaccttctactggagtaaatgctacaggaactaatttaccttgtgttaaaaatacattttttagaacacgtttaatttcagatgccggtggatctaatggaacatctgcttctacaacaatttgaagtgttctctccgctaaaacaactggaactttaattataggatttaccgtaacaataggttctgctggtgcattagataaaggtgtttgtgtttgactgacaactggacacggagcaataattggacacggttcatttgacattggataattttcccccttaaaatatacctgaattttatacgttcgcaattatattatgtattttttctagtaatgagtgggtttttatggtagtcttttttatcattttgtttcttgaatatggattcaaatggtaacatgtatgttttctcctattaatatgatgtataaaatgaagcctcatgaaacgaaaaggtatttttagaataaaaaaacatagaaaaataataatacttcatttctttatacataccaaatacaaagaaaagaaactggaagagttagcgggaaagtatgatatgtttgtgaagggaaatatatatagaagaaatataaaaaatgtgctaacaagtttgcaaacgaactggttaacacacatacgaaatagataagacacgtaaattattaaaggcttaatggatagtggaaccatgcagagtagattgggggcatactagctattcaagtttctcctattcaataatgagataataaaatttcacgtaccttatgtgaaaataaagaacaaatttaagcaataggggattttaataaagaatgacctttgaattatttaatgttaatatacaaaaatatatttatataaatatatttactagttaaaaatgtagattaaatttgatgtggttaaaggtgaaaatttcgattttactttacttcaaacaaaattgctgaaaacttttaaagaagtggataatgtagcaatagtcgaaaaggttgaagataaactttttgaaagagatgatgtgcgaacccatttagcggagattactatcaatgttacaggaaagaatattggatatagatcagtttcagctagtatattttttgctctagacagtctatcaataaagctattcaatattaatattagtgtacattaagtatccaaaatggatgtttttaatttgttaaaagttaaaaagaaattccgcattgaaccagtgaacattctaattagacaagcatatgatgaattcatgggacgaattatcatgtgagatgaaactttggagcaccatatttatttgttgaagggtaccctttttttgcactttttaataaggacaggcatatattagagaatggggtagccccacttcatatatttgagcacctgaaatcgtcaggtgctctttattttttggaaaaatgaatatttatattaaacgattatataaatagatataatatagttatttgattcagatttaaaccaaggggtacaaattcgctgtgtcgtgaaatggatttgtttaaacaatggaaggcagatttacaagctgttgtagaagagaagagggtgaagaaaaaagctaagaaaaagaatatgaagtatagcattcctggtaatacagctgacttcatgaatggaaaagatacttttcgtaaagagaatgggtattgaagcaaagtaattaataatttgagaataaatgattttgattaagtgtataggaactatagtatgcgctgtcgtgatttgggctgtgtcttattttttattaagaaaatataataacaaattaaacaaacacaatgaacgaaaaaatacctgagactattgccacaggtagacttgtataattaataaaagcaattatattaatgtactatttttgatgtccactaatacttatcatcagatttggttcggttgccacacagacctcataagcaagaaattgtacacaatataaaatagtaaaataaatatctaatcccttaacgtacaaggaatcggatattttgtttctaaattgtgtccaaacgtacaagtttccttttttgatatggtgatcctatgcacatcaagctaaggtttttaattacccccaaaggaaaaatttatctctctacagtcatttatgaaaaattaatcgaatttctttttttaacagatgattaatttttaaaaaatatactcaaaggttagggttttataataacttttatgtactgttaatatttcataaaagttattgtgaattttgtgaatgaatgtttttggctttctactttaataaatccatgatgagcttcgataattgattttgatagcgctaagccaattccaatggacccttctttattagaattttttgttttgtaaaatctatcaaatatatatggcaaatcttctgatgcaataccttcaccaaaatcttgaattataatttcagtatgaataggggagtttgtgacttcaatataaatggaactattatcatttgaatgttcaatggaattctttaaaatatttaataaagcttcttgcatccaaatactgtcatggaaaagtaatgttttttcattggcttttaaatgtatgttcatactttttttatttaatttacttttcaaactagcaatgacctcataaatcgtatcaataatatcagagttttctttttcaaatagtattgccctagcatctatttttgaaacttttaataaattatgtattaaaaagctgattcttgaaatttgaacatcattattgtgtaaaaaatgatattgctgttcatttaatttaccttgtaataagatatcattgttcactgttagtgttgagagtggtgtttttagttgatgagaaatatcttgtaaagtttgaattaaaaattgtttctcttccattaaattatgcatactttttctaataacatttttcagtttatgaaaagaattagcaagtttagctagatctccttctctattttccttgatatcaatggtgtaatcaccttcaataattttattcgctgcagctgttacatttctaatttttaagaaaaaagatttatattgtaagtaatttagaaaaattaggattaagctgaaccctattgctccaaggaacatgtatatattgttttgagatatatgtttatttaaataaggaaaaagtcttgagtctaattcagcagatagaccatattgatttaatagcatttctccatcactggaatactcttttttattcgctgtatcatttgtaagtgcttgtattatttcatattcattttctgggttttgtgcaattagtttcccggtaatttcactccaaatagtaatataatcattctttaaatggtcatatagaatatgaactgtgataccttgatatataataaataaaaaagcgattaatgctaatgtaagtatattaatttttatttctctatttatcattaaattactccttactgacgtttttattccaaaaatatccaacacctctttgtgtgattatatagttaggattttggggaatatcctcaattttacttcttaatctttttacataaacggaaagagtgttttcatcgaaaaacacttcactttcatctactatttttttcaatatctcatttctttgtaacactttatgaggatttagcattaacgttaataagagtttgtattctaaatgtgttaaatttatacttttctcatgcttaaaagctctagccgcttcaacttcaaggtgtatattttcagacctcaatatagtattagaagctgttttaattttttttcttaattgtacttttactctagataatagctcttttaccctgaagggttttgttatataatcatctccaccaatatcaaggcccattactacattagcctcctcatccagtgctgtgagaaaaataataggtatatcaccttttcttttaaggtaggtacataaatcatatccatttccatctggtagtccaacatccaatatagctaagtcaaatttattattttcgtattggtcttttgcatcttgtacagtagaaactcttataacctcaagtccttctccttttagagtaaactcaatagccattcctagatcgttatcgtcttcaacgaataatactttatccacagtatctctcctcatttgtctttgattatggcagtattttagattatgacagttattttacacgttggttggctaatttaaaatagtttagtatggaaatggaattttagaggcttttctgagtataagcataatacccaaatcggcttgaagctttttagtacataatgagatacaaacaattacttaaagtagaatatttatgtaattcatacatgtacttgcttatattttgaaaaaccttgtaatagtgtcttgttgaatttgtacgtttttataaaaccattaatgttttgtttaagttatcttatacaaaaatgttaaatgaaattgaattcgcattaattatgtaaatggatttaaaaaaacaaatcattgagaataagagccgaatgggagcggatttttgagaatttgaaaaatatgtgtgtacttaaataagtgtataaaagccatttaattttaaagtatatcttgatcagtgttacgagtatatcaaaagttagatttagtaatcttactaaactgtaagattaaagtatatatagtaagacaagagttattcaattaacaattaaagacgtctatactgaaggtaatcattctttattaagacttgtagcattttagccactgtttatataaagaaaaaacctactgttctaatcccagattaaacatagtatatgaggaggaagaaaatgaaaaagataataggatttctagtagtaacagcaatttttataggtatagggtttgctgtaaatcgttatataaatggtccctcacaaccagtagacggtattatggtatctggaacgaaagaaaatatatctgctgttaaaaatctgtataaagatcaaaacgtgcaaacagcagattatagttataaattggtcacagaagtaataaaacaagaactcactaccgaacagaaagaagatattaagaaagaatggaaagaaaaaggagaaaatatgactgaagaagagatggacaaagaccttgataagtcatctgttagaaagaaacaatacgcggttattacaaaatctacagcagaaaaattcttaaaaaaaggaattgtaagaacacccttatctaaagaagatagttcaataacttcaaccccggtaaaagaaataaaagaattagcgagtgaaaaaaatttattttatagaaaagaagcggaagatgaggaagttaaggatggaaatttaaatttaaatggacaaatgatacctgttcaacatattgaacaaaataattggattggctatttttcatcaccgatagtaattgttaatgaggaaacgtataaacaattaaaagaaaaagaagtaagcctttcgttaattcagtttgcaaaagaaaagtttgattataaaaataaaaataaggtaaataaggtggtggaatacgtttcaaaagtgtatgcagtgaaagacgagaatggtgagtacgataaggataaaatctattttgtagagattcaaaattaatctgtgaaaaggatgagttgtatggaggttgttagattagaaaatgtagtaaaaacatatggagaaggagaaacgcaagtacaggcgttaaaaggaattaatctttccattcgtaggggagaattcgtaaccatagttggagcatcaggttctggtaaaagtaccttattgcatattttaggagggctggatcgtccgagttcgggaaatgtgtttataggtgatgaaaatatctacaattataaagataatgaactctctatttttcgccgaagaaaagttggctttatatttcagttttttaatttaattcctgtcttgaatgtacaagaaaatattgctttgccagctctattggacgaagaacaggtagatgatcattacctggatgaaattataagaactctagggttaaatgaaagacgagatcatttgccttctgaattatcgggtggtcaacaacaaagggtatctattggtagatctcttataaataaacccgatattatcttagcggatgaaccaaccggaaatctagatacaaaaaatacaaaagaagttctgaatttattaaaagtaacggctaaaaaatataatcagacggtgattttaattactcatgatcctgctatcgcatcaaactctgatcgaattataaccattacagatggcatgattatttcagataaacaattagtgcaaagtcaagaaaaatatggaggggaggagtattgattcatagttacaaacagttaagtcaaaaatatctcagaagtaatataaaacgtactttgctaacattaacaggtattattctagcgttggcgctaataacaacgattggacttttttttaatagtggatacacttcgggaattgaaaatgctaaaaaaggttctatgggttctgcaaatatttcagttgaaaattataatcaaaagcttttcaatatgataaaaagtaatcctaatatatcttcttatggcatcataactccaggagaggtgatccaatttgatgagatagctgtctcttatatgtatgcagatcatcaagcattgaagctgttaaagtctagtattcctgtagaaggtaagctaccttcaaatgaaaacgaggctgttttagaaaaatggatgctgccttacttcgggcctaatcttaaattaggcggtatgtttactattcatgaaaaaaaatataaacttgttggtttgttaaataagtctagtagtaatcaggaaaataaacccggtcaattattgacatataaaaataagtttaaagttggagaaggtagcgtattgattgaattgcataagtacgcaaactttgatgaagttgaaaatcaatttaaattattgacgaataaagaaaatataagagtgaatgaccaattaaagaaagccttaaagcctagtgtggagataatggcggcagccgctattagtattgggattgttgtgatttctacaattgttattatttacaatgcatttcaaattagtatagtagagcgaatgaaacagtttgggttattgaggagtataggagctacaaaaaaacaaatcagaaagattgtgataagggaagcaacatttctttctattattgctatcttttttgggattttgtgcagtatattagtagtctttttacttaatcaagtattgataaacgtacttaaaaactctataggatatacaattaaattagattggttaattatatgtgtatgttctttaattacattgataactgtttatatttcaagctattttcctgctttttttgcaggtagaatttcaccgttattggccgtaagtagccgattagctataaaaaaagaaaaaataaagaaaaaaaagagaacaaaattaaagaaaccactatcttttccgttaagtatggcattaaaaaatatccaaaggaatcccaatagatatacagttacaattttgtctattattataagtagtgtactgtatatcacgtttacgtttctcatagatactgccattcagcgtaaacaaccggaaattcaagctctaaaatcggatatatcagttacggttaattcaaatttagacaagcctagcatagatcgtatgagtcaaaatatttataaagttaataacgtagagaagctgtacaagaaatatcaggcaaataatttttatacgaaagtaccaaataataaacaaattaaagaattacaaggaaatgaatcgctgtatcaaaaaataaaatataataatcaaactgtagaaattatgaaaacacaaataaaagcatacgatgagaatagtttaaagaaactagctgaaaatgtaactagtggaagaattgatatttcaaaattaaatcgtgaaaaagaggttgttttagtaaaacaagctgcatcaaatgatatgaatacaagtaaaaaatatataggttctctaagcacttttcaggtaggggatgaaatccaaataacaagtcagcaagaaagaaaatctacagaggaaatctcctacaatgaagaaaaactagaaactttaaaaatagctgcaattgtagaattggacatttttaatatgagcagagtgatggataccataacttttattactagtgaacaaatagctgaatatattacaccatctccacaaaaattaacaggttttgaaattgatttagagaatcaatctcgggctgatgctacaattttagatatacaaaagaaactgggtggagatgcatctatagatgtacaaaataatattgttcaaagtaatttccatacagacaatatactttatataaaaatattagggtacggatttatagctgttattacactaattggatgtgtaaatattttaaataccattacagtcagcatcattatgagaagaaaagaattggctgctttaaaatcgattggtatgtcacagaaggatttgaaaaagatggttatatatgaaggactcctgtacggtttctttggaagtatacaagggatctttttcggctgtatgttgtcgtatattctttatgtagcattgtcaaatacggtgtcttttgaatggattattccttatcaatctagttttatcacatttattactgcactgttgattagttatgtatcggtactaattccgcttcggaaaattaaaaaggataacgttatagatgtaattagagaagaatagcagtagttataacaatatgtgattctgaagtccatccgagatacgtgtaaaacggttcgtaatctgtattatatttcaattttacagtttaaatcgaggaattctaaaataaaaaatacaaaagtaccttataaaatataaggtacttttgtattttttaaaatgacataagatacgtttacttgagttctttaggtagttagggtttgatatactaacttaaaatgaaaatgttgagtagttcattgttagtgtatatcaatatatctgaattaaacatgaaatcttacatcgaaatatctgcgtgatcaattccatacaagcgtcaagtctattacagtgggagcatcgttgttactagttggtggagtcattttcttaaaacataaaaatacataaaaagagaagtaaggacgagttacgtaaaattgaagtgtttgtataaaaaacctcctaaaggaggtcttttatgaagataaacgttttgaagcagtcatctttttaactttcataataatttcacgttctaatatttcatttttcttaccaattcggcttccaataaagaaaacatcgattaaagcccagaaaccaagtccgccaagagtcagtgtcatggcaattgccataccaaagtcacgtgcgtagtagcggtgaccaccaagtccgcctagaaaaaaccaaattaggtaagcaagtccttttgattttttctttttctcaaactctgaagtaacaagaaccatttgatccgttgttaagtcctttttcaatagtaggttatccattagaattctccctttaaatgtaagatataattattccgaatataaatatatcataatattaactttaatgtaataaccaagaaaaatattattggtaattcaaaaattaatggttaaatacaatttaaggaacgtggtcaatcatttgtgtgaaatagcttgtgtataccatttgggatactataattaattttcaatttcatttcaagaacaacggaaacaaaagagaaatcgaaacgaaatcatgaaagaaactatattaaaagcactaagatttaaaaatagaaaaggcctcatcaaataaagatgacattggtgggtcagtttcaagttgtataaaatttaaagcgcatttgtagaatcatggagaaataagagattgtttgttcggttcgcatagcgaatctgttatttaattaaaacaagagattaagaaatatataacatacataattattatagatgtcaatggaattattgttgatgccaatttaaatgaaaatgttagagaataaaaaatcgtcagttgctttttaaaagcgctgacgattttttatatagtctcatagctagtcttaattattaaaagctaaataaatttctatatggtgtaaaattaaagaaattaaataggaatttgggactatatttgttttaaagggattgaggtggatctaatttcattgaatctatcataactttaatatttttcgaattaccgttaacagatagtttcactttttcaatttccaatgtttttgaaaaatcttcatttcctattgaaccaattaactgatctaattcattagtccatgtaatgttagtagcttgaatcattgccttaatcgtaggtatatctgcgtagccagtatacataattccatcaattacttttccgctttctcctaacataacacttacccatttcatatcttgatctgatttatctacttctttagggtaataaaacctatatgtattagattttttttctagttcaagattaaatggaagaatttcaatgccttgtgtagatacagtacttttaattttattatagttttttaaatattcttctgctgtcatatgtttaagtgcaactttttcttttacatccactggttcttttccgggtgcttctattttgttgagagtatctttgtgttctatatctgtgcaacctaaaaggctagccgctatcagaaaggttccgagtataagtattttctttggcataaaaatctctccttaaatgatatagaaaaaaagccgaaggagttgatatccttaacaatttcggcttttttcaagtttggatacttaaatttttttataacgaaaaagaatcatttatatgatctaattgatttaagaaagaacagtacaattagtcctgaaataaataataagaccccatttattaataagattaatggtggaccataaatgtcagcgaaaaatgaggaaattgctaaagcgactggtgatgcaatactcgtaagagaacctagtgttccaaaagtccttccctgtaactcaggatctacctcaactttaataatcacattgacaagcaatgtacaaaatgaaaaaagtattcccaagaggagaattaatggtactgcataaagaacagatggagcaaaagatagccctacaaagattggagctagtaaaaccatactcaggattatccaccaaccccgtcgatgtaacttattatcaaaaaagataataatgcctgcgcctaacatataacctattggaatgctagattcaattatcccaaattcaatcggatttgccttccacacttttacagacattacttgaataagcattaatgaagcagtgaaaaatgtgattaaagtaggcgagagtataataacagatttagcaaaagggttctgccatatatacttgaatcctgcaacaaggtcctcttgaaatgaatttttgattcctgttttttttgtagaattaggaaactttccacttagcaacactaaaatagcggataacataaatgtaactgcgtcaactgagatagcaatgctaccaccaaatgctgcaactacaactcctcctattgctagccccgaaatacgagatacattatctgctacatttaatactccagtagcttgttgaactttgtcttttcctacaatatcaactaaggaagcatggaatgcaggtgactgaaataatcctgcacaggaagtaagagcggttaagataataataagaataaagggggtaccgggtattgcaatacaaaatgcgatgcttagtattaaaagacttcttattatatctgttatccacattagttttctacgatccaccctatctgcaacagtacctgcaatggaagaaaacaacatgctcatgaccatatgagttatggcaattgtagacattaatttggcacttcctgttgcttgcagtacccagaggtttaaagcaatactgtgaaatgaatttccaaacattgataaggtataacctgtaaatacaaaagtaaatgtacgatttttccataatgtctttttcgaagaaacagcaagagcggaatctaattcgacctgttgttgcatagtattgtcacctcacaaatttaagtatctcatttataaaaatttgtttgcaaactaatggtgatgaactttagtaatcgagttagttagatgattaatgaaatggaatctaattgtaaaagagctatattaatatatgatattgttattttgaggtaaaaacggcaggtatgaaatcgatttaagtacataaatgtttgaaaaataaaaaacaatataaattaaccatagaaatcttagaatgtaagtggatttaaattgttatgaaattaaattactagaaaatatctactaatggcattatcaaatttgtagaagtaaatctttaatttataaagaaaattttaattagcatttaggaaggaacattttaactgtacaataatgttttaatttttatataaaatttttaaaaataaaatatttctccagattattttgaaatttctttacagcttttccttggattttcaatatttgtaagattggaagctatatttatattttatagtttattttggaatataagattggtattagtagtataaatagtatttttattaataatctagtatttacttttaatactcctctccgcataaagttttaccaaatattttcaggtgaatattaccaaataaaaaatgttttgtctatgtattttattggggctatattttgtaagcataattatatgtaagaattttctatatttatcctccctatataatgacattttttcccttacttcgacataaatcaaatggtacagtttataggacaaatatagaacccacttgtagacattattttgtgtgaaaaattgaatcgaaacatgagttactagttaggaggcgaaatatattttaactatttttcaaatagtacttaagggtagagtgctaaacgtttgaaaatagctggtaaatgcttctatgggatggaggttgtcatttgaaagaaaaagataagcttaaggtgaataggaacaacgttaatttttctaaggatataatatatcaaattgtaacggacagattccataatggatgtccatcatataatcccaaagggggattatatgatgaatctaggaaaaataaaaagaaatactttggtggagattggatagggattattgaaaaattaaatacaaattattttactgaactaggtgtgacgtcattatggatatctcaaccggtagaaaatatctttactccaataaatgatttggtaggaagtacttcatatcatggctattgggctcgtgattttaaaagaacaaatcctttttttgggacatttggagattttcaaaccttaataacaaccgctcatgcaaaagatattaaaatcattatggattttgcacctaatcacacttcgcctgcattacatgatgatgcgacctatgctgaaaatggtagattatatgataatggattgttacttggtggatacgataatgattacaatcattattttcatcataatggtgggacggattttgaagaatatgaagacggagtttatcgtaatttatttgatcttgcagatctaaatcaccaaaatatagctattgatttgtattttaaagaagctattaaactatggctagaccaagggatagatggtatacgagttgacgcagtaaaacacatgtcatatggctggcaaaaaagttggctaaattcaatctataattatagaccagtatttatttttggtgaatggtatatcaatccaaatgagtatgaccatagaaatgttcattttgcaaataatagtggtatgagtttattagactttagttttgctcataaagtacgagaagtttttcgagatggaatggattccatgcatgggttacacaaaatgattgaagaaacatatcaaatttataatgatgtaaataatcttgttacttttattgataatcatgatatggaccgttttcacattaatggacaaagtaaacgtagaatagaacaatcattagtattcttgttaacttcaaggggaataccttctgtatactatggtacagagcaatatatggttggaaatggagatccgaacaatcgtggtcaaatggaatcttttgatgtgaatacagataactttaagataatacaatctttatcttcccttcgtagtttaaattatgcacttccatatggaaataccaaagaaagatatataactaatgatatttatgtatatgaaaggtactttggaagtgatgtggtattaatagcgttgaatcgaaatttaacagaaggatatgaaataaaagatgttaaaacaattcttccttctagaaagtataaggacatattagatggtcttttagatggtgaagcaattagagttgaaaataataatatagattcattatggcttggacctgggtcagtacatgtttggcaccataaaggagtaaatagtatacctttaataggaactgtgggacataaaatgacaaccgttggtcaaataatttgtattgaaggatgtggctttacttctaaaaaaggatcagtattatttgaagaaaaagaggcggaagttgtttcgtggtcacatactagtataaaagtaaaagttccagcagtaaacgatggtaaatatgaaattactgttgtaacagatacaggaactaggagtaatatttataaacatatagaggtcttaaatacaaagcaagtttgtattcgatttgttattgaaaatggatatgaaataccagagagtgaagtttttataatggggaacacatattcattaggaaatatgaatccttgcaaagcagtagggccattttttaatcaaataatgtatcaatttcctacgggttattttgatataagtgttccggctgataccttgcttgaattcaaatttattagaaagatcaataacacactattgattgaaggcggagagaatcataaatatcgtaccccgagttttggaactggagaagtagttgtaaaatggcaaactgcagaaaaaactatcttggtggagtcttaaactttttttacaattgtaattaaaatttggggaatttcattctggtagttaaaacaaaagcttatactgaaaaattctattaaaagttaataaaggatacggttttaaagaaaaaactagaaaagaactgtattaatgaaagtgaaaaatagaaaattggaggttactatggaacgagcttctaaagtgattacgattgaaaattttcattctgaaatacttgagaatagtaggaaactatttatatatttgccacctggttatgaaagtaattcgtaccaaaagtatcctgtattatatatgcatgctgggcagcgcttgtttgaaccagtagtaaaaaatgatgaatcatggaatgtccacaaaacgactgatatgctaatttatgaaggtaaaattcaagagataataatagtaggtatagcacataaaagaatcatagaaaataatgagttttgtcatttcatttcaccagataaacatatagaatgctcaggtttattatatgaaaaatttataatcaatgaggtgaaaccttacattgatgaaaattttagaacattgactaatactgaaaacactgctctaatagggtcatcagcaggtggtttatcaacttataatattggtttccgcaatcctgaagtgtttgggaaaattgggatgttatctccattctttgtgaaagttgaagatgatcattcggaattaaaattatatgaaatgtatgaaggaaaaaaagacttgaaaatatggatggatataggtagtgcggaaggttttttcttggtaaaacatgtgagggatattgcagaaactttattggaaaatggttataaatatagagatgatttaattttttatcaggatccaaatggtgcacattttgagaaagactggggagaacgtatgcatctaccattaatatatttctttggagatgttggtaatatagttaatgttacattagatggtcgagatgtagttggattaactggaatgaaagtgaaaattaatccaattgttacgtacgatagtggttttgaaatgagtgttttagatggtgtatttttagttgataacccagatgtgttagaggttatgggggatggaacaattatacctaagaaaataggagaagccgaagttacctttgtgacacaaggtgtaaaaggaatacctaaaaaatataaggtaatagaaacattatcagaatttgtagatgtttctgtaatagtcgaagtacctgaaaatacaccagttggtgaacgaatttatatgagtgtaggcatgatactagatagaatagaaaaaaatcgttttgcagggaattttaaagtgccaagggaccttgcatgcaggtttaagttttcaagaggatttaggctctttgaagtggataaattaggacaacctattccaaatagaaaatttaaagctactaaggacttacagttgaattatactgttgagaactggatagggctgtaaaaaaaataaatatggggtgagtgctgtagtgaaaatgaaagaattaattccaacttttgatgtcccttattattattcatgctatatcccaattcttcacgataaattaaaaagtatgggtagcattagttacatgagtttaatagcgaatgaagagttatatagtataccagcatatcgtatggatactatcacatcggtaccttctgtagcaagatatacacagttgttagaatataatcaaacatttcgtatggagaaacatgtatattctaatttcgaaaaagggcttcagtatataaaagaatgtttgaatcgtcaagaagtatttattgccttaggaagcaccttttttctaccatatagtaatgattatttgaaccccaaatttataaaaagtcatatagacgtccatacagataaatatgttacagaccattacctcgcaattaacaaacttacagaagatagagtatttgttcaagatccagttcctaataaatttatgggtgagatatcaatggaggagttccattctttttggaaaggaggaaaagctatacctgaattggctcaagcaaaaggtatagaaagaatttcatcttactcatcaattgatgtgattatacaggaaaaaataagcatggaaaatcttaaagatgtttttttgagaacactaaaaaaaatatccagtgagtatgttcgaggtttaattatacaaaaaaacaataagatatattattttggtaagattgcagctcttgaacttaaagaaaatataaatgaagatttttataaacaaagaaatatgtttcctttgtatttgaaatgtttatttgatatgagatggagtagatattttttatatgacttacttatagacatgaacgagttatttaaagataaatttattaatattactagtgagttaatggatataaaacaattatgggaaagactatataagattgcacatattaaattattaaaaaaagatagtaacttaagtgatctcgaatcttttaatttgataatgatggatattattaatagagagtgtgtcttacatgaaaatattttatttcttctgcaacataattatagtcttcagtcttaatagggaaaagataattaagagaagtagagaaggctactacgtatacttacaaactttattagtagaagaataagtgtatttagtgttcatgttatatactactacaattgccggaaggaaatcttcatagtaaaaagatgatttataaaaaggagtgtatttacttggaagatacaaataaagaaaaggttattcaaatcgtattgtgctgtgttgaagaagtgaatgaaaatcttgaaaataaaattgaccttgaaaaaggcttgaaagcacatctttatgattgggaggggtatttagattcgttagggctggtatctttattggtaagtattgaacaaggcttagaagatgaattgggtttatcagttgatttggtgaatttagatacaatgtcacaacataatagcccatttaaaacaatagaaacattagttgcgtatattttagaatgccaggaacaattaaaatcactaacataacaaaaaattaaaggagaaaatttaaaaggaggttaggtatgcatattgattttttatttgaaagatttgaaatgaataaagaatgcgaagctatagtttgggaggataaaacttacacatatgagtggtttctaaatcaaataaagatttatacaagggagttaaatgaacatagaaagatggattatacaatagtctctttggaagcggattattctccatactctatagcaatgtttttagcacttattgaattaggatgtactgtagtaccgatattaaattcattggttgacagtaagaagaaagaatactatgaaatagttgaattagaaaatgtaattaaagttgaaaggggaggctttgaaataatcaatatacaaagggattacattcaaaatgatttattattacaactgaaaaagttaaaacatccaggattagtattgttttcatctggtacaaccggaagtagtaaagcaattgtacatgattttacattacttcaaaagaagtacagtgtcgcaaggagtgcaaaacgtgttataccatttatgttatttgatcacattggaggagttaatactctattccaaatcatttccagctcagggtgtttggtaattattgatgatcgtacccctaatcgagtatgtaacatgattgagaaacatcaagtacaagctttacccgcatcaccaacttttataaatctacttatactgagtgaggtttataaaaagtataatttaaatagtttgcagaccatttcttatggatcagaagttatgcctgaggctacactaagtaaaataaacgaaatattccctcatgttaaaattacacaaatgtatggtttgtcagaatatggagttttatattcacaatctaaatcgaatgattcattgtggatcaaactaagcgataagaatattgaatcaagagtagtggatggaatgttgcagatcaaatcaatgtctacaatgattggttatattaatgctccaagtccatttactcaagatggctggcttatgacaggagatatggtggaagtagatggagattatattaaaattttaggaagaaaatcagagattataaatattggcggagaaaaagtatttccagctgaagttgaaaatgtaatacagctaatggatggagtaaaggaggttgctgttgttggtgaaaaaaatgcaatcacagggcaaatggttaaggctgtggttaaattaagtacaaatgaaagtgtaagtgaatttagaaagcgattaagagagttctgtaaagataaactaccattatataagattccacagaaagtggtattaacaactgagaaaatgcatacagagcgttttaaaaaagataagaaggtatttatgtaaccaaaagttgaagttcttttatacaataatttaaaaataaattataaatcccttatattttgaaaaaactttttcaaaatataagggattctttttacttttttcggatctaaattgagtaattcatataaataagcttcttcacaaaataaagatttacgtgttgaggagaaactttatgtttatagagtttgttgttgtttattattacgattcgataggaatttatctaatgaaatagattggctgttatttactacaaaaaataaagaaacagccaataataataaatcaaattcataccctcctataaatccttgatcaaatttcacagtaataatggcaccggctataagtaaagaaaataaggttgaaataattcgtgtaccaagccccagaataactaaaattccacccactagttcaagaattgctactggatatgcaagccaatcgaatattcctaggctgttgaagaaattttctgtattatgaataccatcttgaaattttatgagtccatgtgcaaaaaaagttaaccctaatactaatctaataatgaaaaaacttaactcatttttgtttgacaattgattttcccccattcaatgattttgaagtactgttagccatagatttttcattttccttattctaatgatctatatatgatatagaatcaaaaaacagtatatttttttgctttgcaactttactacttgatcactttttgtttataggaataaggttctatccctttaatatttatttcaatatcctgaattgctgtattgttaatggatccttcaattattccaaacgttttatttaggatgtgaccggcgcttttaaacccaacataatgtccacgaaccatacgtggaaaacatgcaccaaacatgccttgtactgttataattgattggaaatgtagaacctcagtaattaatgttcctatcattgcaattttcattttactatttggaggtactttaatagaatgttcaattgaaggagaggtatgaattgattttgaattactttctcctgcaaaagttgaaatattaaattcattacccgattgaaatttacctgcaataataagatctgattttaaagttaaacctgtaatagatttcgaactccaagattgtatattgacccattgttcttttattatcactacaatctctttttcttcattattaggattatatacaaattgttcctttagggttatttcatttattgaaggttcttcaagatctcgaaatataaaagggcccagcattttataacaagcatgaccataacgttcagtaatagcaggcttattatgaattggaaacgtctcattatttaatgcaatttcgtcaggaagtattccataaagatctttaaacgcatccattatggagtctgtagttgaatctaatgaatctagatctgaaaaagataatttttcttgtataatcatattaatgctccttacctacttgtgtattttattcgtttgatcgtggtcaaaagacaattaaaatatgaagaagagataaactaatagtttgacagatagaataattaataacttttgagaataaattccattttatgctgtggtattcctatcaattaatactcattagaaatttataaagatttgattgaattttaggaaaatagaggttattattgaaaatctaactaaggataaagttattgaacgcatcaataaacggattattaaggatggaaaataacggataaatagcagagaaatgaatatgaacggaagaaaatcttgtggctcacaaagaatttaagagctagagatataaataacagcacagataaggttgaagaaatctacaaaaggctttatcaattctagctaaatgataaaagccctgcaggggatgcagggcaagactaagggtattgaagaattgtcgattctaaaagtaaaggacttcttggaatgttttaagtttaacacataatatattaaaacgttatataaagatgttacagaaatatgaatataaaaaaactctcataaatattatgaaaaagttgagaatctatagaagctataagggattatgtttgcaatggtgtctttatagagttaatagggcaggcttttgtttgtcttagtattcgggaatctagtagaattcccgaatactaagacaggttcctgggtattacgaagcataaaagcatcaaaaaagcccgtacagaagcacaggccggttgatacacatatcggtaactaaatattaacagaaatagttagtaagtactattgaaaaaataaaaaactgttttcctcctaagacgttttgaagaaaacacatataataaagcacttatattataccaaatgttttctcctaattaatatatagtatatattaatcatccagcagaggtgctttttacttcttttatagaatttacacattaaacatatatgtatacgcattgcattgttactacacgctcaggaatagtaataaaaagatgataccaataaaactgtataaaaacaaaaagaatcctaataggggtaattctttatgaaagttgagcatgacaaacctccttggatatatagaatattttaatatattgttggtctatttaaaaagaaaaacataacttggtacattggattagaggatatccatatgaataggtagaatctaattatctggttcacattttaaaccaaggggtacaaattcgatgcgacgtgaaaaggatttgttgaaacaatggaaggcggatttgcaagctatccaagaagagaaaaggctgaagaagaagtctaagaaaaagaataagaaatatagcattcctggtaatacagctgacttcatgaatggaaagaatacttttcgtaaagagaatagggtatggaagcaaagaaataaataatgtgaggataaatgattttgattaaatgtataggaattatagtaggcgctgccttgattttggcgacgtcttatttgttgttaaggaaagataacaaaacaaataaatacaaggtgaaaggatattaacgaaaaagccaaattagtaggaagtaaatttaaaaagtcctgtcttttgacaggactttcaaaaagggaacaacagttaacaattgaaggtacctttatattaccattactggtaatataattccatgtgttatgtgttgagaaataatcttctataagatgaaaaaaagtaaccaatgaagttaagtaacgcattgatgtaaaaatgacatttggacctgtaagtaatggatatgaaacatatagttatggtcgagaaaatgaacagttcataagctagaaattttagcttgcatatagtatatgttgtaaagaaagggtggggatgaagtatggaacgaccgaactggggcatcgggggatagtattcgtgggctgtacgtttcttggcgcgggagtgggatctatgtttgggggcgccaaaactgggtggatgatagggatgggcgctgggtttcttggtatggctttgacgagatggattgggaaataatataacaggttcactttcttcgataaataaagcgataggcacataagaatgtacttacataggatttcaaaaagagacaccaaagggcgtctctgcatacttacatttccactttaattattacaatacccttttaacatacctttagaaaaacgatttggatataaagcaataagcatcccgtaggggcttcctttccaatagcgttgtaagggtgtccgtaatttttgatttatgagccatcgttgattaaatacgtttaatagctgtttttcatccagtttttctttctcttcaatggtccatcttaatgcttctagtgctttacatttggaccaatagccaactggtgtaactttaaattcccattctttaaagcgacctggatataagtcgtttatcattttaaatggactatttccccacattaattgacatggagacgctaatctgtgagtctttagccactttatactgtatacatccagtatttgttcgggtgttaatttttctttttcttcaatggtccatttcaatgcttctaatgctttttcttttgtccagaagttattgggcgtcatgagaaattcccattctttaaaacgactagggtacaaatcgttaatcattgcaaacggactactattccagtacatagccagaggggcactaagtttgtttttctccaaccattttttgccgtatacgcgtaagagcttttcgttcgataacccttttttttcttcaatcatccatctcaaaatcgttaatgccttttctttcgtccaaaaatttaaaggagtcataccaaactcccattctttaaactcacttgggtataaatcatttattgctttaaaagggctattttcgtatctatgtttgagtaatcctcgtaatttatactttacaagtaattgagtgttccatttttttctgatgtctataaatgctaacttaaatatgtacattaacgcttgaataaatatgtacattttcaattggattctccatactgactaatactgaatggttattactatctaatttcatttatataccagcccttataatttataagactgattatatcagaggcaaaataaaaaggaaaaccttttggctacgccaaaccgaaattcatctcccacctaccgttgggctacgcccttcacacgcttgaggaaggagaattctttccggaaattcgttaaaaacattataattacaccaaaccttttacatctataagagaaacttaaaaagattaaaatatttaaaaagagtaataacaaattttctaatcaacgaagttagaatacctgtaatcattattactgtagataaattttcagggctgatccccagcaatagaaatcaacaattcccctataatcaagcaatttcaatagttgttgtataaactatcttaaactctagtggctcattattaatatatgagccactaaaaaaggaatccttattaaaaggattcaccacagaaagatatacatcaataaaaagaattaattataatataaaaataaaagaaatatattgagaaatatataataaatttgaatattctttctttttatcgtaaaatcaatatgagtcaagtgacaacatctctctaactctcctaaaagaatcctttatgacatggggattcttttgctttggacaaagtatccttattttagcatttgcaaaaaaacctcttcttaaccaactactcaacaaatataagtaaggatttagttttaagaatatttttttgatctaagcaacaggtaatagccttcaatatttgttagatttaaaaatatcctaaaaaataaaaagatgctctatcaatactgtaagaagatttgctgctaaacatgcattttttcattgtaccttttataatctgagctttttaacactaaagaattaagtatagatttatagccatgaattcttctatttgtacatataatattctttatatctctcaaagtttgttttttttgttcgtgttgatgttatgggtgattttaatgatttagatactgctacctgctttggtgtttgtaatgtgccccgtttcttaagttctctatacaaactactcacattgcacctcagattttttgcaatagttggatattcctctccttgattaaataattgtactgcttttttacattttatgtcccatttttcttctgacgtttgaaatttttgagttcgttttttaactctatttttttctaaattaataccctctctttctattttacatcgcttggaagaatactgttctgcgtctgccttaagcccggaatgctcctcctgtaaacgtatcatttttactttttttgcaatttctctcaagttaaagtcacctcattttgtttgataaattctaccagtacttgatcaccctattgtctgtatccccaatcatcgtttataaacagctataaatactcacattccccttataatagttttcaatctaatatttacggaaaattataatcaattctatttttacataattggaaactatagtaaattgataatattgacacagaatattctaaaccttaattcatactatacacatcaataaactaattatcccctttgcttaaaaagtcgaaaatatcgttttcgcatagcaaaacactgtatcccctattcagagtcatacaaaacaaaatactttatctattatagctatggcacaaagaaaaagaatgcagacatgtactgcactcttttttagtaacctctatatcaatttttcaccacagtcagctcctccattattagaaggactaaactttaagcttgtgaatttatcattctgcagtacatcatcttttgcagctatatttaacaacactctttctatcatcctatttcgatttagaattaaatacctaatactccgacaatctgacatgccttggaattcacaatatgataatacatctctaatcctcttctttctgagcgaagaatttttccacgcattttagataaatgctgagatacggtagattgaggaacatctaatagctctgttaactgtgttacattacaaattttgtggtgttctagctccttcacaatttgtaatctaactggatgggccatgatttttaatagttctatatctgcctctggaattttgtacatttcattacttacttgcattgttgtcattttttatttctccttttttaatttctttatatttttatctatttataggtattttttgtttattcgagcatattgttcataatcgctgtattgtttattcttttgtctctctcagatttaatatatagaagtattatgatagctaaaaatccaacaaaagatagcataggtatcgagatgaaaccgaataaatttaagtaatcttttgtgcaagaaactcctactgaacaaatctgcatctcactattaggaaacgcttgaattgtaatttgatatacagataacattaaaccgatacacgcaaatggaaatgcatacgtgcttacgtgcgaatcttttctatatatccctacccccatattaatactaatggatacatggccattctttggtaccagcaaaaatcacatggcggcagcttcatccattcactaaaaaacaaactaattaacattgcactagtagctatcgtccaagcaattacaatgtgatacttttgaatgatcaacatcttattttcgcctcacctattttttaaaatacaaaacatttgctagtatatgactagtttatttccgtgtttcgagtaccctgtttcaatagaaagtatccaatcattgatatcttctcagtcgtatcccctctcttttaattctagagggaaaagattttcaaaatcaccacgcatttcgtacatggtttctaatgctttttctagcgaaccaaatctatataccatgtgtgtaagtacttttttgtttttcttttctcctacaactaaatatacataccgtctttctttcgctaaaacaaactttaaaaatccaggtacttgactcacctttcacactccttttcggctttccttaccaaacttaaaaggatatgagtaaggaaaactatttagctttaattaccaatttaataaatgtcccgtttttttgctttgaaaatacaagaaaacgctcatcatcacaatatttattacacctgctgcagcaccaattttggagataacatacacatattcattattactaaatggcaatagactcgcgaaaataaataaaattgaaataataaaggataagagcatatttcttttgttttcattcattcaaaaaacctccattttgcacaaatatttgtattgcaatgggttagggtgttaagctgcatctttacggttataatgctggttcttttcatctacaaagcctttaatgctccatacgccaacctttgattcttttgcttcattttctgcttctttcatttcagatagaattgtagtattaggtctagaaatataggctataatcccataacccgacttgaccattaattcgttgatgtgtattccatcgcaaaatacataagccaattttctaccgtatttgtcttcttttggtccccgatcataaacaaatgttacacttttcccttctagctgtttctttaaaaaggaagatggttcttttcccatcttttgtggtggaattttttgagatacagactcaggggtatctaataacagtaaccttaccatctgtttctgcccctttacgtttacgtctattgtatctccgtcttttatatgtaataccttccctttaacggtctctaagtcttttaatttccccttataattccctggaatatcaacaatacctttcccttttacgtgctgttgtattccgttttgtactgcttgggcaggtctcgaatcattttttgtttgcgtcgaattgctacatgctgtcatttgaaatacaaatgatgttatacaaatagccttaattcatattttcatatcggaaattcttcctcctaatcaaaatacgtaaatagctacatctaataaacaaacggactctctattgtatttacttctcgataattacaacataggcaatactgtatccattttggataatcattataaagtactctaaatgagcgtttcttacaattcgggcatattgacactatgtttttttcattctcttcctgacttttcaatttttcaaaagaaacattagtagatgctatattactggtacacaatatacatcccccttttcagtcttgaaatcttaaaaacaaataaaaaaggacacacctatcgcatatgtatgcgtaggtgtgtccttttgcaagatagttttagatgtattttgttactttcatcatatcatacttcttattaaatttatatatgaaattaaagattttacgatattatttctttttctcatgtataaacataatgcgttgtttttgtataacataccttaattttgcatcaagtttttctccattattcctattttcaaaacttgaaattgtattggtcatattctttctaataaccttttttatttcgtgctagttattttctttttcaacatgatgttatttatcttttattttgggtaaacaaatattacgggtagaaaaacttctcttattctaaaataattccctcgacacaaagatactatctcgtacaagcattcaacttaataaatatgttttaggaaggttagaaaaatggatattttattagcgattttaccagccttattttggggaagtattgtactcttcaacgttaaactaggaggcggtccttacagtcaaatacttggaactacccttggcgctctagttttttctatcggtgtttatatttttataaaacccgttttgacgcccgtggtgataattatcgggattatatctggcctattttgggcattaggacaagccaatcaattgaaaagtattgatttaattggggtttctaaaacaatgcctatttcaacagggatgcaattagtttcgactactttatttggggtcattgtatttcatgaatggtcaacaacaacatctgttgtattaggtgttctggcacttctttgtatcataatcggaatcgttctcacatccctccaaagcaaagaggagaaaaacgatgaacaaaaaggaaatttcaaaaaagggattgtgatgttattaatttcaactcttggttacttagtatatgtggtaattatccgcctattcggtatagacggatggtcagcgttattaccacaagccattggtatggtgttaggtggaattctactaacctttaagcatcaaccatttaataaatatgcgattcacaatattattcctggtttaatttgggcagcaggaaatatgtttttatttatttcccagccgcgtgtaggggtggcaacaagtttttccctttcccaaatggggatcgtgatctcaactttaggtggaatttttatattaggtgaaaagaaaacaaaacgacaatttattgcgattgtcattggaattatcttcattattgcagctggcattatgttaggaattgctaaaggataaaaaggaggaaaaaattatgtatacagatttaaaagggaaagttgttgttattacaggtgcatccacaggattaggaagagcgatggcaattcgttttggagaagaacaagccaaagttgtaattaattattattcaaacgaatcagaagcaaatgaggtagtacaagtagttaaacaagcaggtggagaagcgattgcggtaaaaggagatgtaacagttgaatcagatgttatcaatctcgttaaatctgctgtggaagaatttggtacactggatgtcatgattaataatgcgggtattgaaaattcagtaccttcacatgaaatgccattaagtgattggaataaggtaattgctacgaatttaacaggggctttcttagggagccgggaagcaattaaatattttgttgagcatgatattaaaggtagtgttattaatatgtcaagcgttcacgagcaaattccatggccattatttgtacactatgcagcaagtaaaggtggcgttaagctaatgacagaaacattagcactagaatatgcaccaaaaggaatccgtgtaaataatattgggcctggtgctatgaatacgccgattaatgctgaaaaatttgcggatccagaaaaacgtgccgatgttgaaagtatggttcctatgggatatatcggagaaccgaaagaaattgcagcggtagcagcatggcttgcttcttcacaagcgagctatgtaacaggtattacactgtttgctgatggtggtatgtcgctatatccatctttccaagctggacgtggttgattgatatataactaaattagttactttcaataagtttaaatgcggcagtaagctttttattgaataaccttttaattattcgtgacatcacatgcattttgcaaaaaatacacttttctttctgtagaattataggaaaggataaagttattttattttaggtttacaatttcgctttagttaaatgccgatgggtaaagaaaccctataataaatttaatattataatcaaaaaaaagaataccttataataaaggattccttttttttgattatatagctgctatttaaaaacaaataatgttatacaagcgatcttaatccaagacttcatcgtattaactattaaaaaatttagatgttagctatatttctgaagtatacaatgtgaccattccatgtgttctattttcacttgatataattaatttggtaatattcttaggcgcaaatcgatatatagaaatattcggaccaggattattagatttaaagtgaataacttcttcattatcaataaaaccttgaatatagctttcacttccttcaaaaaattgaaaatgagctgacactgatataatctcgccattgttctcaaataaaactattgaatttctatatgtatcaaaattaataagtttcatttttgacataattaggatgctcccttctatgaaagcatgatgattaaagcatactaccatttaaagcaattcttttattaccatgtgtaagttctaatgttttattgagaaaatacaagccatcttgctgatgtgaaatcataattaatatattacaaagattgtaattttgaagtatctcatacataagatttcttgtatcaatatgtaaattagatgctgcttcatctaatattattatatccctttttgtgaggatagcccttaaaaaggctataaattgtgcttgacctcctgaaacactggaaccatcttgtacaattatagtatctaatccattctcaaatctgttgagatgtgatgttaaatgataccttttcattaacttaactacatcttctttcgttttatttgtttgtccatataatatgttatctaatatagttcctttaaacaaaaatatattttgtgaaactatacctattctatctctaacactttctttatgtattaagttatagtcaatattatttatcaatatctttccactttcaggttgatataaacctgttaataattttataaaggtagattttcctgatccatttataccatcaattaataacttgtcacccttttcaatttgcacgtttaaatgatcaaatatcaaatcactatttccattatatttaaaacaaacatctttaaattctattgaattaattggttctttcattatatttgtacctagtgtattttcaacatctaaattgaagaactccttaattctcttaatactaatacacacgggttttagagttatatctaagctgcctaaagcttgggtagtcgcaaggagtttagccatataaattgaaaatgaagtatacacccctatagtaagctggttttgtaaaattaaaatacctgataccagtaatactattactgtaacaaagttatttgttactattaaattttgcataaagaaaataaaatgtaaactttgttttagcgcacttttaattacattatttaatttactcttaatcttattggtttgtatatttttaccgtttaataattttatatcctctattccatttaaggtttcatacatttctgcgtttaatactgccgatgactcgtatacgtttgtggtactttttgatatcattttagaagaatgtttggatattataaaatatattgggataataattactatgatacctgtaagtttaacacttaaattaaacattataaataaagcaaagaaaaaatcgaatatacctgaaaaaacccttaataaatttggagaaaataatgcacttacattaccagattcagcaattctgctaagaatgtaacctttctccttctgattaatataagaaagaggcgcatctataatattacttatcatagataatcgaatttcattaactacattttgttgtacacgagtaaataaatactcataacctatcgatattaaatagttaatacaataaattaataagagtataagagttgtttttaataattgatcgtagcttttgtttaatagtataactttatcaataatgtagccaataatatatggtatcggtgcgataatcaaagaagctataaccatcccaattaaaccaagagctaacaaagtttttgtatttttcaaatacggatataaaaataataactctttataagaaatttgaatttcatcttgtttatttatcttcttattcaccctctttctcctcctttgtctatttattatattaatttacgaatcaatataatgaggtttatataattccatagatatcttgagaccttatcccgacgcattgtctatggaattatattggtttatcctcagaaacttaacaatattcatctcatccaatcatactaattttgccctaccattaatggctccttaattatttcagggacatgatttttaaaccatttacatttatcgccaatttcttgtgcttttataaagcttcttaagaagcatgtactacaaaaacgtttattttcacactctttacattcctcagagtccatttgaggtgcttgcaagttaaaaaatgcattaatgtatttgaatttttcgtcataaatatctttaatattctgttcaaaaacattacctatactgtttttcaaatcatctaaactatgcatagtacacattttaatttcaccatcaggcgcaatcacaatatgtgatgttattgcaccacaattcctaatctcagcgcgcgcaccttcatataatgaaacaaatttaggatattttttatttattttcaacaatgcttcaccatatgttttaacatcctcttcatttaaataaagatcactacatcctaaggctcttcccattggtattactggagataccccaatactatcaatccctaaattatgtacccattcagctatatcttctacctcgtgcacattcaaatgtgtaactattgtggcgatccgcaaacgaacatcattttcggctaatttcattatgttatttttaattttatgaagtgtattaggaactttaaagaaccaagtcaaataattatcatctaagctatgcatatcaatttgcacaaatgttttcgacttattttttattattatgtccataactttctcagaaagagctataccattggtcaacagtgttatttgagaaaaatccaagttaagtgcatataacaatatctcttttagatttggatgtactgttatatcaccgcccgtaagttcaattaatttcactcctatattatttaagtcatctaataaggattttatttgatctaagctcattacttttggctttactgctccaaaatctccatagcaatgacgacatcttacattacatctgtttgtgatttcaattgaagccacttttggatatatagtctgttcttcaattaaattaactggtacatttataggttcttcttgcgtaccaatgttcatattgtaaactttggatacattatttaaaaatgcatttaatttcttttcaatacttattggatcttcactgtattttaaagacaagaaagatacaacttgtccatatgttttagtaccatcaattaactcaataatttcagtggcggttttatttatcgtaaatgtattttcgtttttaagcgtaggagcgctttcgtttgggtttttatgaactaccaacatagattcataatttgatgtgaattttcttatttctagcttttctttccaaaataaatagccattcactttaatcatctcctataaaatttaaatttgtttttagtttatgtattacaaaaatcccatactcgttttcgataaatatataggacttattcttaacataactgtttgtcattagaataagtcctaatttaatttcaccataaacactctcacattttaaaattttaacttgcagtactagctccggttgccgcagtaactagatttaataactctacagaacatgctgcacatactaagcaactccaacaagtccaatcccttggttgtactactggtgtttccatttagaacatctcctttttggttatttatttttcttctagaaaattcatttgaccaaaagtgctcattctcttagtacctttaaccaaaaaacttctaaaaggatattagcttgcagtactagcccctgttgccgcagtaactaaatttaataattccacagaacatgctgcacatactaagcaactccaacaagtccaatcccttggttgtactactggtgtttccatttagaacatctcctttttgattatttatttttctcctagaaagtctaatttgaccaaaagtgctcattctcttagtgcttttaaccaaaaaacttctgaaaggatattagcttgcagtactagcccctgttgccgcagtaactaaatttaataattccacagaacatgctgcacatactaaacaactccaacaagtccagtcccttggttgtactactggtgtttccatttgacctacccccttttctgtattgtgtggtgcgactaaagtataactccctatgttttctaaaaacaatcaaaaaattttaaacattttgtgtgtgtttctttaatattttgtgacatatatttacaaaactttctttttggtttatttaaaataacaaatatctttattaactgatactaaaaattttatttatgaaaagttatttaatcgcagtatatcttgttaaactgctttttataatttataatgttaactgtgtatggtgtgtatggtgtgcattacataacataacacttatcgatagagaggttgtttaatgaaaatagtcttaagtaatgtatcaagtctgcctttatatcaacagataaaggagcaaattaaggaatccatatttaacaatgaattaaaagagggtgaacaattaccatcaatccgctcacttgctaacgacttacatgtaagtgtacttactacaaaaagagtttatgcagaattagaaacagaaggctttattattacaaaggttggaaaagggacctatgtagctcctacaaatttagagttgttaatggagtccaaacgccggatggtagaagttaaacttactgaagtttgtcaaatggctcgtagtataggtattcatgcagatgatctccattcaattttagatttaattttagaggaggagaatgaaaaatgaatgttgtgttagaagtaaataatttaaataaatcttacggaaatttttcgttaaaagatgttaccttttcacttaatacagactgtataacaggatttatcggtacaaatggttctggaaagaccactacaattaaagcgattttgggtcttattttaaaagattctgggaaaattaattttctaggaaaagatatggataagcatgaaagaaagtctaaaaacaaaattggtattgtgctagacgagggctatttttatgatgaattaacagtaaaggaaatgaaaaatgttattgctccatcctacactgaatgggatgaaacagttttccaaaattatattaaaaagtttaacttaaatctagaacaaaaaatctctactctatccaaaggaatgcgaatgaaatttgcagttgcattagccctatcccatcatgcagatctattaataatggatgaaccaacaagtggcttggatccattagtacggagtgaattaatggatattctccttgatttcatgaaagagccggggaaaagcgtatttttttccactcatattacatctgatttagataaaattgctgatatgattattttaattgatgatggaaaagttttagtaaatgatgaaaaagatgttttaatagatacacatgcattggtaaagggcgacaaccgcttaattaataaacaaacaagacctctttttttaaatttacatcaaactcactatggatttgaagggattactaataaaaaagatgatgtacgtcgactcatgcctgatgtattaatagaaagaccaactattgaggagattatgctttcatatattggggggaacatccatgttaattaacctagtgatgaaagactttttgttagtcaaaaaatattttctaatcttactcgtttttgctgctatagctcctatttatctttcttcacaattacaattaaacgatggcggtcttgttagctttcttttaaccgttattttgatggaatatattttgttcggaacggtatccaaatttgaggatcagtacaagggagcggctttactttgtgctaccccatacacacgaagcgcatttgtaaaagcgaagtacctttttctttttgtaatttttatttgtgcagctattatccgtataatcatttcagttgtcgcaccatcgggtatagaaagcctgagcgctagcgctcttggaataacttttttaactctaagtattttatttggtgtactacttcctgttcagtttaaatttggttatgacaaaaccaaaatcatatcacttttaactgcttttttaataccttttgttgctcctactcttataaggggactacaatcaagtgatattgatttcaaaagtatttttccattctcaccaactgtcctaacatggatgccttgtttcatctcaattattattggttttatatcaatgataatatctctgaaagtatatgcaaaaaaagatttataatttaaatttgaaatcataggaatgagtaattaaatactttatatatttaattactcattcccttttatttaattctcttctctaatgaacttattcctaaaatacattttatcgatatcaaagtgaataaatttttcaaatcactaattcccttaacatctcttttcattaacgatttagtaaactaaggattatacataatatatcaagaggtgattttatgaaaaaaataattaaattccttttgttaattaacttgatttccggaactttcatacctattactacagttcatgctgaaaataaatcacaatattatactataatgttgaagaactatgaaaataaccaaaaactagctagtaagtttcaaaaatatgatatgcaagtagtctatagtgtcccagagattggtgttatacaagtgaaagctaccgaaaaagcaatgaatattgttcattcggatcctaatatagattcatataataagtcattacaatcgtttaattcaagagaagtagcaaccaatgtctcttcccccctacccttaaatgaaatatgggagaatcaatgggatatgcaacaagtaacccataatggtgatagctatagactatatccaggaactaaaaatgtaactgttggtatcattgattcaggcattgatataaatcatcctgatttaaaagataacatttcacctggatctaaaaatttagtacctaaaggtggatttagagagcaagaatctcaagaaacaggtgaattaaatcgcctaatagatctaagaggacatggaacttttactgctggacaggttgcagctaatggttttatgaaaggggttgctcctggtattggaattaaaatgtatagagtgtttggtaatggagcaggtgaggctatttgggttattaaagccatagttgaagctgcgaaagataatgttgatgttatcaatttaagtttaggcgaatacctcatcaatggtatagtatcttcttcagacggtgaatctagtgaggaattatccgaaattaaagcttatagaaaagccattaaatatgctaaatcaaagggaagtatcatagttgctgcggctggtaatgatgctcttgatgttactaacaagcaggaaatgaatgatttttttagaaaaaaaaatgaaaatactgggataacatttactggagaagtattagatgttcctgctgagttgccaaatatagtaacagtttcatctgttggtccatctaaattactctccttattttcaaattatggtgaaagttttatagatattgctgcacctggaggagataatagattatttcagcaatatggtttagaacagtgggtaaaaaataagttaatgttaaaagaactaatattaactaccgcccctggtggtggctatgctctctctataggggtttcacttgccgctccaaaagtgtcaggtgctttagcattaattattgataaaaataattttaaaaaaaatccagataaggccgtgagatatctttataaaaatggagttagcaatgatacccctactaataaaagtttttttggtaatggtttgcttgatgtctataaagcgatttcccaataaaatatatacacttcaatttggttttaaactaacaattgatagtgattttttgatggaacctttatttaaagcaagtctaatcgccttaaataaaggttttttattatattgaattaaatttttccatatccatctattagattccctatttagtcattcttggatcccacttttactaataaccttaacaagtggttatttgcataattagactattgtatccaaaataaaaaaacactattcttcctttatatttctacagagagaaaggcgtttttctggcagatatttctctaaacttttgagagagatgttaatgcaagattgttattccctatgttcctctatcaccttatagtaatcaattttttcttcaataaacattatactactcggagtataccgagtgtatttttgtaaataataagattgttaaatgttaaatcgaggaggggttgtatgcaagatcgtaaaaaatctataaaaagtcctggttctgttatgaaaccagattttgctgaaacagatgcacaaaaagtgaaacaagaaattcaaaatgatgtaagagcaggacaaggagcaatgacttcccgagaggcaggggcaatgcgagattaagaaaacactccttattggttttttcttctctagaactttaaccagtaaggagttattcccgaactattttagctttttacgtttttcctttagaaacataatgcgtttcgtttgtaaatcataggttaatcttacatcgaatttctctccattaaatctatttttttaaactaagattattttctttcagataatgtattgcatctttgttcaccgatcttaaatctataccttgtttctctgctgcaaatgaacatccacaataacactgacggaaaacatcatattcattacacatttcaattgaacgttgatatccattactttttttgaaatcacttggtaaataacgcgaatcataatttttttgtacaccgattccaagttcatttattaattgactatttttatttttagaaagagtaatggcactcccaaagtaatcaaaacctttttcttgtgctacctcagctgaacgatccaatctcatatcaaaacaagctgaacaacgaagcccgccttctggctcttctgccaaaccttcttcttttaccattttaaaaaatacatttgaacggtagtcatcctcaagaaatcctactgtgtgcccagtacgatcattgaacttttctacaaagatcttttgttcattagagcgtcgcatgtactcacttttcggatgaatattcgaattcgagaaaaaaaccgtaatatctgcatgttctgcaagaaattccaatgaagcagtactacaaggagcacagcatgaatgaagtaacacttttggtctttcgttccttgcttcccaatcattaatcatttttcttaatactttatcataatttattttctgattcttcattttctttaaatacgtttctacatctaacacttctttcacaactaaacctcctgtttatttttatttattatatcacttaaattcattaataaaatatagtaatgtatgtatttatcgatcgtaaaacggttcttatgacctttggtgatggctaaaataatatatgtattctattacctctatttctaaaataaatccttaatccttctttttcatcacaaaatcttttggattaccttttaactggtaatacttcacgttaagacgaataactactacgatgattaccaaaaatcctattatatataacattgttccttgctccgtttcttattgtttagcgaacttattctgtaaatacttcacatgtttattttcagtatccttatcagtaatatttgcttgcaaaatagtctggtaaatatgctcgacctcgtcttttgttaatttcacatcaatataggattcgatacatttttttagatcgttataatataggacatgtttatctttagaatgaacatttactctttttaggctgcattttggatgaaacgctgcaatagaaatacacggcagctgttgttccatcacccattcaattgttttcatgtgcttataattttgtctaaatggattctgaaaagagtgtttctttctaaaaataccttgtgtccatcttgctgccttctcacttccataaatccagccctcgtagttcttcgtctctataacaaatatacctgtttctgcaataacaatatggtcaatttgagttgtatcaccatactctgtatgaaccgccacatcatgtaacacccaatacctttcgtgatctaattttcttactatacgttttaccatcttttctccagctcttcctttccattttggagcatgtttttttaccataatgtttatcggtatcagaagcacaattagaattaattcaaatattaatactttcataatttaagtccccttttcacattcttgtgtttctacgcattaaacgatatacatgggtttctaatcctaaaatataatatgagatacataaaccttttatcaccatctctatgaatcctaatgctaatgaaacaatgagtccgccccgaaattgaaacggtcttgtcaccctccgattcactgttttttcaatcactccaaaattagcccaggttggcaaacgcttttctacattctttatagtgcccattaatccatatttcaatgacaaaataaaacatccaattagtaaatatataatagaagaaaaatagatagataagcccataacaataattgtgagcagccaacctatcaagatagaattacgtaaagcggtatattctggatttcttttcaaaacaagcactcctatcaaaataaattaagttattattaaatacgaggtatgaatttctaatttaaatattattttagtttctatcttcctcgtctgttttgtaggcataccagctctactacgaggagtattcattctacaaatggaaataatttacaacgaaaaacaattaaaaatcgaacaaattatcccctatatcagaggagatatttgcagaatatgaaaggaaaaatcagatgggtagataaaaggtactgaatgaacattcagtaccttttgcatctatatatatttctttacatattcgcaaataaccatggagccagtacggctaacatacatagtaaacaagatcccgttataacgcgattagaccaacgataatactcaggttgttttgtactctcatgaattcttcgtaaacgaattcctgcaattaacataaagggtgtaaaaataagtgctgttgctttaaacaggtctaaaaaatccgtaaaaatgttcataaacgaaaatacatccgaactaaataagaaatatacacttaatctcattgccatcatactaacgaacgagaaaatcatactccctgttgcccatttcatccattgaccattctttgtaattaaccccataaccatgacaataacacctaatatgaaagagatagaaaagatatttacccctactttaaaagctggtgcatacataccctcaactttttgtataattgatgacccaaatgaatcgtctttctctgtcgtttttgttcgattgtttaatccttcgttaaaagatgaagaaacatcatttcctttcaattcattaaaatccatttttacagatgcatgagctgtatgtaaaggtatgagtactaggatcataaaaacatatgtacataaaactccaatcatccctttttctcgcttcacaacacatcacccgctaattttggcttaatgctctttaatttgatttcatttccttctgcaacataacggagatctgcggaataatagatattggcttttgtatatgcccccataatcgcatttgcaatttcttctttttctactgctacatatgtttcattttcattataaaactctatttcaattcgattaatattattatttaatactgttatatgtaactcttttaagctattcaaacgatttcctaaaccacacactagcttaaataccttactcgcaagtgtaggtggcttaacatacgtcgtattaaaatgaatcgtttcatcatctataacaccatcttcctcgactgcgcatgtcataatgaaagaatgattttgtttttcaatttcttgtagacttaacttgcgatcaatgacatatttcagacttgttgatagattttctatatattcatccagttcagtatttgaaattttaacctctgagaattctgggaaaatcatgtaagcgtgcatattagaactacttttacttacacgtaatacctgtacctgtttcttttcatagcgcaccgtttgttccaatttttttactacattgttgcttatatgatctattatcatatttcatcagcctccagtaattttaataaaataatttttacaatctcatgtatataaagcattgcaatattttgctgaggtctcgaaactcatattttatgactaataatcactttaatcttaaaacatcttaatattacaatgacgtacagtgtttcattatagtcgaatattcttatatggtgaatcgttctgtttcactcatttgcataaaaataaaaggctattttatccttatacaaatgagtgagaacatactgtatttcatgctatttatctaagaaaatttaactgggaaatggatgttatacactccctagtcatctattgtttgattcaactaatgtatagaaaataggtggattcacctcaaattttatatacattcatatattttctggtattatccctccttctgtataaatccgatagcacttcttattagatatctttataaataatgttaatccttgttctctttctgtcacttttgcagtccactttaacgcttgtgcctcttctacttctgattttcactattaacaaaaagcacaattgttcaagttatagaaatgtcattcatgttctcacttagcatttacttctccatccaaattcttttagaccgatgtaacaaataaattgtaaacactgacagacccttttctaatgtaatttcctttgtgagagtagtaatacgctcttacgccttactaatcatcctgcattcccttggtcagcaagaaacaagacgtttcaccaatacatttcccctctcaattattcaaatgaatcgtacttaaactagccctttacgaatttgtttttttctttttcttctatgtattgaaattaaataaaatttttccgccaaatcatttttatatgcataatcatctaccagatttctaattgcaataaaaaaggaagctccaagtattcatatcacttagttcttccttttcccctgtataaactaccatcacatgatttatatcgcagttcttcatttgcactccctaataacttatctatatcaatcaatatatcatccggctctttagattactcttttagatctactaatactattcaaacattattttatttcattttgttatgaatcataaataatcccacctgcaacttgaaaacaacataaaaaggacttcttcaagtcgattaaaaatgtgcataacaaaataagctatatatgcactaatcggctcaaagaagccctttcaaaattgaaacaagaacacaacttgcttctgcaactcaaccacaacacataaggcgtgggaataaacggaattcaacaaataacaatatacctatatattatacaatttagattttcgtatcaagaatttttttattatctttagtcatttgtcagatgttatacaatcaatacgcattatctaataagttaattccaagatcaaatattataatattaatagtaatcaccagtgaagttttactaataatgataaataaaagacgccaactagcgtcttttatttactcttccatattttgatttttcaataattcaaattcctatctatgaaatatactcctcgtaccatttagcttttttagtttacactttacactctttttcttcatctcactcttgtatttcttcgtacatacgctgcctttctttgttaacagctctaatttgatcgtaatcgtagtcaatcgattccctttcttctgttctacgttgtatttcttcgtatatacgctgctgctccttgtaagctgcatccccctgatcgtaatcaattaattcctgttcttcgcccctaatttgtctttttcgctcttctctcttttgttgtagttgatatcttctatatgccttcttatcagtaattttttcacagtcgtgcgctagctccttcgtttcgtcatgtccatgtccgcaaaaatcgtttggaattatagcactagatttcttaacagattcaggattagggtcttcatgttctttgctagccttctcatctttaactgcagtattgctaagaccatcttgctctttgttcgttacatttctattagaatcaaactttatagtcatcgaaccgtgtccaccgtgacctaaatatatgtagatagagaacaatttagttgtttcgctggatccaggctttcctgctatctctatgactttgtccgcaggcattccaaccttgatttgattatactgttctagtgatactgttgatgcgtcctcatgtacatctttataatgcggatatttgtcattaatttcctcatctttattcttagattcctccacttgttgtagcttttttttcttcttaggttcttctgtatcctctttgaccttaggcagagtggacttcttctctacaatcttagggggattagtcttctcctcttcgacctttgcgacttctatagagtcttgttccttatatggcttgtaatccccatcttcctttgcagagcaggcactgaaaattgatacagacgttgcacttaatacaagtaatttctttaataatttcgtattaaatttcataatattattcccccgttacatatattaaattgccccctcatgcttcctcctataaacgttatccttttccttcgcacatagactcacatataactttgcgtaagcctcttcgatattcattacagatcactttttggctgtagtacttgtacacccctataacatttcaagttgatcagtgtaacccacaagtcagcatctttctcattattcgcactctatttctatcaaatgtcttaattacgtatcttatgctgcgtaaagaattgtatattaaatgtacttcgttatttaccttactccattaatcaacggctaagcgttaaattagtgatatgtaaattttttatctttctattatataaattgctgtatatcgcattattataatattattttagcaaatattgtttatccattcaacgttgatttataggtgttaaaaaacgaatagagatgaaatttcatttgctaattcacataattttcacacattaaaacgcttcatgttaatatttgttatataatgaaaccaagccttaagtaagatagtttccctgttacgagtaatgagatagtttgtttcacctttttatattatctaaaaaagaacttgtagtgatgcctacaagttctttttgcattttttatcattttaatcaaggagacacctacaaaaatgaagatgaatcaagtgatgattaataaagcctataaatttcgaatctacccacatctagcacaagcaattctaggcaacaaagttaatgttatctctttattatcaagcgaaggttttatagtaccctcagaacgaaattttgtgctaacttgtaacaatacagctcattttttcgttttaaggtatttcataatatgggctggatgggtatgtatagtgacctctgcttaattatcacaaaaacaggttgtgaagaaagtcttcttcacaacctgagattaagttatatatccaaatatgacctgttcttttaagtatttagtcttttataatctgttatagtcgatataactagagtcataataaatccactgacctgttccaattcttagccaaccattcttttcttcatatactgtaactttttcgcctttacttgtctttctaacaatagaatagtttgtacctgacccgcttcgaacatttaccccaataccattaatttgagctgttccaactaccttttcaacactgccattttcaattacttgtagcatatttagaatgaatgttgctgtttcaccacgagttgttgttcctttagggtcgtattgattttcacccttacctttgacaatacctaagccatacaatctttgtacatcttctttatagctaatttggtctttgtctgagaatggtaggtttacaactggtccccatatacctttatactgtaaagccttgtttacaataattgctgattcttctcttgtaataggtgtgtttgggtcaaaataaccatctcctctaccttgaatgatacctgcacttgcagtacgtttaataccatctcgtaaagttgaatttgcatcgtttaggtctttaaatgaagcatctccagctggcaggtttagagatttagagattaattgagcaaattcggctcttgttatcgctctattgggtgcgaaaactccgtttccttcccctatcataataccccttctatttaactctcgaatagcttcttcataccaacctcctgtaatgtcatcttttggttgataaagattattataatatccctcaacgctatttacgaatacatcccattgcccattattaatcatgttagcagggcagattttaccgctccatttttggtgttttacaatgttatttaacggtacaccagtttctttcattaaataagctacaagtttcttagcgttatctactgctttactgtagtttccgtcactgttaactgcgatttcaattgcaatagattctctattacctggaccatcaccgtctcctgcgtgccatccgttctcgtttaatggtagatgttgataaatctctttatcgtctactgtaaaatgccacgatgcagcacggtccgtgttacctactgcttggttatataggtattgagcatggtttctagcacctgctcctacacttgtattatcagtctcatgaattgtaatatactttggactcatgtagttttgaggacgaatattatcgttacctgctggaacaatccattcagtgaatggaacaccgtttattgtactagaggtgctaggtgatatgggagacagactacgttttgttctgtttgaattgttaggaacagttaatgtacctgtttcttcatgaataccttctgaacgttgaagactatctactttcctattgtcgacagtacctccaccacgtccgtctacctcttcaaaactagcttcaatactttttaaagcctgttcatctgttgttgtttgaagttggtctgtgttaccttgcacttgaaggcttgtagattgcttattgtttactgattgttgttcctctgcaaacgataccaatggtgaagataataccgttaatcctgccgtgaatgctactacttttttattaaatttaatattcatttctaatttggcatatctcactatcttaatagatataccttcctccttgtacttcttttagttcgaataatagtttaaatattggtagcctgaaccttcaaaatgacggattgattttacatttcatatgtcaaaccgacatctataagtcctacatgaaatgtcagtactttagaattataacacagcacggttgcaataattccaagactcttgcaagtaatctcctaatcttcgacatgctgataggatgactctaaaaaaggggcattatcagtatggaaaagggaaatttgtttaaacggggcattatcacagcgctatcaagctaaagttttatacgacccataaagcaaaaaacgttatcctttctatagaattataggaagggatagcatttctttatgaatctttaaatgcttacgtttactgaagaattacagcggcatatgcctccccaggttctacaaaggacgaagcacttgattatcaacatgattgatcgcatctagtttctcaggataacattttaagagttcctatttcaaatggtgaagattacactatagatgataaatttacaacttcactcttattattcatctgcatagtttatcataatggaatagcattcaaaaaattccctaacaatataaatccccctctccaattccttgaatctgagcaatcggtacacccttactggtctttttgtttttatcgtcaccctttcaaatcatcttcatatgttgtatatagatatctcctttcgaattgacaatgatgcctctttcaagtccttaatgtacgccttacaaagagcacttttgaaaagtgctctttgtactttgtaatacactcaatctataataaagtaattttaatgtatgaataatttacacctgcctctttgtatgaattgtaattatttgtacacactataattggaaggcttgaatcattgtcattgaaaaatgttcagcacttatgttcagcacttccgctcctcgtatagtatgtttaaacttaatttttttactttcatgagagacctgtaaaataactcttggacgtctcaagatatgtcttttttaagcaaataggcctttgataactttaaacgtttatattttttagttgacatattaccgcaggtctaaataattaagtttggatgatgatgagggaaatgaaaaataaaaaatccctcttttcatattgagaaagagggatttttacgtacaagttatgcacccgtatataaacgaagtccctcattctatctttcaagcataaagcttgcaggaagtggcacagtattcaaaatgaacctgttgccgaggtttcaaagggccagtccctccacctctcttgatacaatgagtaaacgaataaattttattaatttttgtgtttctttgataattcaaaatcttacaccttgaataatgaagtgtcaactaaatgaaatatagtttaaattttcagttttattaaacgaaaaaaccactgcatagggcagtggtttttctactagaagttaaagttatctggatctggaccaacgcgacgatcttcatttaaagcttgaattgctttcatatcatcagcacttaattcaaagtcgaagatgtttgcattttcaataatgcgatgttctttaattgatttgggaattgttacaacttcgttttgtaaatcccagcgtaaaataatttgcgcagttgatttattatattttgtcgcaatttcttgtaacgttggattatctagtagttgtccttgcattaatggtgaccaagcttcaagctgaatattatgttctttacagaatgcatgtaactcttcttgtgctaaatgtgggtggtattccacttggttgaccattggcttaatttcagcaatttcaaatacgtcttgtaagtggtgaatgtggaaattactcacaccgatagcgcgaacacggccatctttataaagtttttctaatgctttccatgattcggtatatttcccttttacaggccaatgtactaaatataaatctaaatattctagacctaatttctctaatgtagtttcaaatgcttgaagtgttgtttcatatccttgatcgctattccatacttttgaggtaataaataattcttcgcgtgaaacaccggattcacgaatcgcttgtccaacaccttcttcattttgatagattgctgcagtatcgatgctgcggtagccatttttaattgctgcttttacagaatcaattacttctgaaccatcttctactttaaaaacacctaaaccaaaccaaggcatttttacaccgttatgtaatgttgtatagtcttttaaacttgttaaaatcatattatttccccctagcttttttgtttgttgcttctactgctttttgaattgcctctgaaaaattatattcgtataaagttttgagaccctcagctgtggaaccacctggcgttgttacttgttcgcggaggttagctggattttgcgtttgttcgagcatagaagcagagccagaaatcatttgaatgacaagatgttttgcggtttcttcatcgactccataactttttgttgtttcaattaagctttcagcaaagtaataaaggaaggctggtgcacttccagtaactgcagtaagctgatgaacttcttcctcagtacaaagttgcgaagtaccaataccttttaaaagcagttgcagggtttcttgatgcatctcatttactgattgtcccattgtatataaggagatagattttccaatttcagcagctgtattaggcataatccaagcaacaggcgtgccctttgggagtctagcttctaaataagatggtccaatgccagctgcgactgttacgactagttgatttgatattaacggagatagctcagctaataactcttcatgagcagaaggtggcattgctaaaacaaccgtatcaacagatgtaacatgctgtttccaatctgttgcagtagacacattatatcgatgttgtaactgttttagcttttctacgttgcttcgattagagacgataatttcttcgatgtactctttgcttgttttaagtaatccggaaaatatagcttctgccatacgaccggcaccaataaataaaattcgatgtttagttagcatattctttattcctttctagtagagatatgttataaaaacgatatcatctttaagagaatgttgtaaaaagaaaagacttaccgtagatggaatggataatgagaaggcggaaattcatgctaatattaactgttattaatctctttatatgtgtagctggtttgctagagtggaagagcaattataaggggcaagaacatacaaataattatatctagaaaataattagaattgaaaaacccctgaagcatatatgcttcaggggtttactaatagaatataagattatgcttttgtcataccaagtaatacagcgccgccgataattaaaacactacctagtgcaataaagatcaattgacgttttgttttcttttcacctaagaagacaatcgcaccaaatgttgagataacgattccagtttgagataatgggaagcttgttgctactccaacacgtggtaatgaaagaagtaagaataagtttccagttccccatagtaaaccagacaaagcattacggattgcatatttgttaaatggtttatgtttagacgtcagtacaaccgcaccaacaaacataccaactgcttgtggtaaaatagcagaccaaccatcaatattataccaacgaataataattacatatacaagatagccgaaagtagaaacaattaaagtaagaagtccttttttcaattgtccaggtggctgagcattttctttatcatctaatgatgtgaatacaacaccaactacaattaataggattgcaatcgttcccagaatgatcgttgtagtagtagtccactcacggaaagcgataaccccaaagatagaagttgcaacaagttgcataccagtagaaatcgttacagtagttgaaacacctagtttttcaactgtttttaattggtttacttgtcctaaagcccagaataaacctgaaataaaaccaacaattaagattgtcattgttaaagctggttgagtaaatacatacataattgttgcgaagaatagagcaccgattgtcatacctaccgtttggctatatgcaccaccgcccatttttacgcttactaataagatgtttccccatgcaattgcaggaagaagcgctaataaaatgtccattacaagactcccttcggtttgctataccaatatagttacatatcgttctaacgatcggtaatgccccactaatagagtagaagattaccgatcgctaaaacaggatgaagaattcacaatataaatgcgttttcatttcttcattttttgaaacacctccatataataacaggaaattgcctattttagaaagtgaattcaaataaaatgtatatttaaataagaggtaaaattcagttatttcccattggtatattttatttcctaagaaataaagaagcagcttcgacaaaagctgctttaagagttagtgattcttttattaataagttgaatacatagtagaaatacgagtgacataccgatagtaataactacaagtgtccaggcgagttgcatattacttgcatcaatagccatgtaaattgcagttgggattgtctgtgttttaccaggaatgttcccggcaaacatgagtgtagcaccaaactcaccgagcgcgcggacaaagctcaaaatcatcccgcttagtaaggcaggaaatgcgagtggaagtgtaacgtgcagaaaaacttgatattcacttgcgccaaggtcacgagcactttcttcaatttgtacatttgcgatagaaaatcccgttttcgctgattggtacataagcggaaatgcaacaactgtagaagcgataatcgcagcagtagatgtgaacataatagactgctgaaataatgattcaacccactttccgatcgggctgttgtttccaaagatgataatgagaaagaagccgataacagttggtggaagtaccattggtaataaaaatatggtttctaatagtactttatatcgccatgaggagcgagctagtgctcgcccgacaattgtccctaaaattgtaacgagaatagtggcgcacgcagctactcttaaagatagaaagacaggcgataaaatagcatcaatgctcatagtaattacgacagaactgtaaatccatatttcttaaagatagattgtgcatcttttgactgcaaatactcataaaatgaagtcgcctctttcttatgtttagattcctttataacacctaaaggatagtggattggctcatgagaagtagctgctgctgtctcaccaatctttactttatccgaaatgagagcatctgttttgtatacgatgccagcatcgacattccctgtttctacatatgttaacacttggcgaacatcttttgtaaatacgactttattttgaacatcattccaaaggttttcgtgtgttagagaagcctttgcatatttgccagcaggtacagattcaggtgtaccaagtgcaatttttttgattttctcatcttttaaatcttgaaattttgtaagtgaactatctttagggatgactagaactagttcatttccaagaagatttttcccttctttttcactaatgaatcctttttttacaagggtttggaatttatcttctgctgcagagaagaataaatcagcaggtgcaccttgttcaatttgttgttgaagtgctccagaagcaccgaagttaaaagaaagtttgatatttggctctttttctttatattgtttttcgatttcttttaatgcatcttgtaagcttgcagcagctgagatagtcagttcaactgttttatcctctttagcagctgactttgtatgcttttccccacttgtacaagcagcactaaatataagaaggaaagaaagtataagtgccccgatggaacgtaatgtaaatttattcataaaaaaatcccctttcgttttgatacatctaattataactaattatatctaaatataactagttataattgaatgtaatttgaacatatatctatttttaaaaaataggagaaatattcttttctttgttacaatgaaaggagaaagtgaggaatcgtctatggatcatcattcctacacaacggaagaagtagcaaagcgattaaaagtatcaaaattaactgtatacgacttaattaaaaaaggagaacttccttcttatagagttggtagacagatgcgcattgatgcaacagatttagatcaatatataaaacaaatgaaaacaggaaaggtacaagttactcctgtaaaaaacgatggtagtagtatcttgaacacgtgtattattagtggtcaagaactaacgttagatatgttagctaaacgtatagaaaatcgtttgccaagttctaatgttttaagggcgtatcaaggtagcttaacgagtttagtgaaaatgtatcaaggagaaggaagtatcgttagtttgcatttgtttgatggtgaaactggtacatataatgttccttacgtaaaacgcattttagtaggacagccatgcattatgattaatttattgtccagaaatgtaggattttatgtccgaaaaggaaatccgaagagaataaaggcatgggctgacatatccgggtccactataaagtttgtgaatcgagaaaagggttctggtattagagtgttagtcgatgaacaattacgaatccaaaaattaaataaagctgatattagtggatatgaatgggaagaatcgaatcatcttggtgttgccacgcaagttgcaaatggaaaagctgatgtaggagtaggttcagaaaagttttcgcaaattgtaaatgtggactttattccaatcatgaaagaacagtatgatttagtaattttgaagaataaagaaaatgaagagttgattgaagttgtgaaagacattctgcaatcggaagaatttcataatgaattaaatgcgattggcggatatgatattacgaaaacaggtcaaattgtatatgaaacaaactaaaaagctgcttgtctataagacgagcagctttttctatatataaagggggttggggaaacaaagtgttaaacaagaccttgagcaagtgtataaatgaaagccgtaagaagagtggctccacttgcaagtacgataaagtctgatttgttgaaagtaatgttgttcattataaactctccttatttgtttaatgtagttgcaacagcttttgcatcgacaagtgcggatagcaccatgcccattgtatttaaaaatttatttgatttcatattgttcatcatgcgtatccgctccttttcgaattgttgttgccctgcttatgtcttaattataggaaatatggctacttgcaactattgaattagcttacgaaagacttacacttttgtaagaaaaaaagacattcatgtaagaatgtctttcacagcatattgatatgatgatggtcttcaattgtttttaaaaaactacgcattgaattcgtcatatagctatctttacggcgtatgaaaaccgttgaaatactgccgtatttttcagggattgcatgacaatgtaccttacctgctttagaaagatgatggacagcagactgtggtacgagtgtaattccgaggccgagtgcaacgctgtttaatattgtctctaatatattgaattccataattctttttggtagcaaaccttcatctttaagccaacgttctagtttggagcggtatccacatccttggttaaaaacgagtagaggagttgttgtaaattcttctatatgaaaggctttattttgtgttataagcattaatttctctgtactaacatcgtattgttcgattagtggatgtttaataggacctgatataaaggcgccatccaattgatgatcaagtacttctctaattaattcttctgttagacccgcttgtaatgataaatcgacatttggatagcttttatagtaagaagataaaatggtaggcagtgtacttactgtttcgactgtaccgattttcaatataccggagggtgtttcgctatctaaaaatacttgttttagttcgtcgacatcttgcaaaattttactaacataaacgagcatttttcttccttcagctgttaaagtcattcctcgtttatggcggtaaaagagtggggtttttaattcgttttctagttgtttaatacgtgtagttacatttgattgtacataatttaattcctttgctgcgctacttacactaccctgatcggcaacgcttttaaagatttgtaagtctcgtaattccattttgtaatcccccttgatgttaactatcattataaatgatagttaacatcattttgaatcattttacgtgatatattttttcttttacaattctctttgtgcaaatagaaagaaacgggggattgcggtgagaagaggtcaaatgataataggggctgtagcgtgtttaattgcgagtatgtcatggggagcgatgtttccagttgctgatcatgcgctagaatacatagatccattttatttttcgcttattcgctatggagcagtggcgataatgctgattgtattgttgttagtgaaagaaggaaaacaggcatttcgtttagagggaagaggaaagttactcgtcttttttggaacgatggcatttacagtatataatgtcctcatatttttagggcaaatgttgatgggtaagtcgggtgtaatggtagcttccattatggaagcacttatgccgatgatttctatttgtattttatggggatataagcatataaaaccgaagaagtatatgataacgagtatggttattgcttttgtaggagctgtgtttgttattacaaaaggtgacatgagtttctttgtaacattgaaagataatatgttcccattagcatttatatttattggtgttataggctgggttatttatacgatgggtggtcaaacgtgtagtgattggtcaacattacgttattctacgttgacgtgtgtattcggtacgactgttacaggaattataacggtaattattacgtggcttggatatgtttcagttcctagtatgggaacgatttctattgtaaaatatgatttgttatttatgatgacattgccaggtattgtagcgctacttgcttggaactacggtgtgaaaattttatcatccattaatgggattttatttattaattttgtaccaattacgactttagctattatgatgatgcaagggtatcaaatcacaatgtttgatattatagggactgtacttgttattgcagcacttattcgcaataacgtttgccagagaaaagaagaaaatataaataatagagttttacaagaagaacaattacgtcaagctgtttaataggcaaatggaggatttcacatgttagaaagtttattgtttttcttcgccgtcggagttgcctgtgagcttgcagcaattaatcgaaatggtcgtaaaaagataaaacaacaagctgagctgatacagcttttaaaagagttgaaagaaagaaaaaattaaaaagacgaccgggcatagacggtcgtctttttctatataaaggggaaaggggacacaaagttatacaagcgtagcagcgtaaataaaagcagtaagaagaagagagccgctagctaatcctaaaaagtctaatttgttaaaagtgatgttattcataatacattctccttacttgtttaatgtagaagcaacagcttttgcatcgaaaagagccgataataccatgcccattgtatgtaagaaattgttcgttttcattttgttcatcatattaatcgactccttttcgaataattgttgccctgtttctgacttaattgtatgaaatatagtaagaagtaactatcgaattagcttacaagaaaattacacttttgtaagaattgaaatttaacaattcatacttatttttattaccaactcctaaaacttagtgttataattgttgtaagaatatgattatacttcggatgtttagaaaggaacgaaataaatgtataaaccaattacatttttgttgaaatatatatttaaaacagctgggaaagtagaagtgcaaggaagagaaaagctaccagaaggtggtccgtatgttgttgcgtgtacacatacaagttttatggatgtattaatgttagctacagggatgtacccaactcaaattcattacatggcaaaaaaagaattatttgaagggaaattcaaaaattggttctttaaaaatgtaaatgcattccctgtagatcgcgcgaatccgggaccgagtacacttaaaattccatcacgtttattaaaagaaggaaaggtagtagggatttttccgagtggaacgagatcagcggaagatgtttcattaaaagcgggtgctgtgacaattgcgatgcgttctaatgtacctttagtgccggcagcttatgttggtccatcaagtgtaaaagaattaataaaggggaaaaaggcaaaattgatttttggagatccgattcaaattgaggctggagaacaaatagatcgaaaaaccgctatgaaaatgatgacagatcaattaaatgagaagtttgaggagttaaaagaagctttgcaatcaaatcaaaaataagaaaagacgaccgggcatagacggtcgtcttttctattactatttataataaaggggacacaaagttatacaagcgtagcggcgtaaataaaagcagtaagaagaagcgagccactagctagtcctaaaaaatctaatttgttaaaagtgatgttattcataatatattctccttacttgtttaatgtagaagcaacagcttttgcgtcgataagagcggaaaataccatgcccattgtatgtaagaaattgttcgttttcattttgttcatcatattaatccgctccttttcgaatagttgttaccttgtttctgacttaattgtatgaaatgttgcggaaagtcactatcgaattagcttacagaaaaattacacttttgtaagagaaacaaatgaaggtgtaatgataagaagatttgacatatgttcatgagattcattaacttaaagatagaggtgagtgcatggctaatattaaagatatcgcaaagatggcgggagtttcagttacgactgtttcgagagtgttgaatgatcacccatatgtaagtgaagaaaaaaggaaagcggttatagagatagttgagaaattgaattactcgcaaaacgcaaatgctgttcatttatcaaaaggaaagacgaatattgttggtgtgattttaccgtatattaatcatccgtgttttgatgcgatggtgagcggaatgatggagattgcgttaactcataattacagagtgttactttgccaaacgaattataataaaaaagaagaaatgaaaagtttacatatgttaaaaacaaaacaattggatggtcttattatttgttcacgtgcaaatgattgggaaacgatagaaccgtatgcttcttacggcacaataattgcttgtgaagataatgatatttcaaacatctcaagtgtatatacgaatcattcagcggcctttcaattaggaatggattatttgattgagaaaggttataaaaaaattggctattgtacgggaagaaaattagggccgagtagtcaaaagcgttttgatgtttataaacagcaattgcaatctatagatgaagaggttaacgaagaatggatttttacagaatgttttacactagaagatggtgtaaaagtggctcataagttaaaagagatgcaggatcttcctggagcattaatagtagcaggtgatgaagttgcgattggggttatgacagaggttgaaaaattagggattcaagttcctgaggatttagcgattattggctttgataatcaacctatctcgcaagtgttacaattgacaactattgatcaaaatttaaaggagatagggaaaactgcttttgaaatgttgcatagaaaagtgaatgacgagagttctaaacaagaaaagctggaaattccatacgaacttgtggaacgctctacagtttaatcttaatccgttatgtgtataatcgcataacggattatttttttgaaatatctttgacaggaaacgcgtttcatactttataaaggagttaaaccggtctgtaatatccatggattcttttcaagtgttaaagcagtgaatagaatttggaggaatatgcatgaatgaacttttatcgagtatgaaaaagtatgtagatgatgatgaaaagattttagtttttgtggtagggatctttgagaaggataatttcatgttatgttatcaacatggaatttttgttgccactactagacgcctcctgttttacgggaaatttccttactatccttcaacatttaaagagtactcatatgtgcatatagatagcatagattttcatccgtactttgagtttacttgtaatcatgaaaccattcgcgctaagtatattcagaaagggaatgtggagcaatttgtccgtgcagttagagcaaatatgaataattaatcaaccctctgtttaaacataatatttcaatttttaagagggaaaatgcggaataaaaaccacttctaaacctctaggagatagtgatacaatgtcaaatggggggagggtatgaactatggttaatcaacgtataaaggaaataacactaattacaattggttcattattattcgcaattggtattaattactttgcaattccaaaccgtttatcggaaggtggaattattggtttaacggttgttacgtactacttatttgattggtcaccagggattgtgaattttgctataaatgcaattttactagctattggttataaattttttgataagaaaacaatgatttatacaattttagggattgtagaaacatctttgtttttatacgttacagaacatattgagtatcatgtaaatagtgatacattattagcagctttatttgctggtttatttgtgggtattggattaggctgtatgttcaaagccggaggtacatcgggagggtcagcaatcttagctcggttagcaaatcaatatttaggttggagcgtaggtaaaggcgtactaattattgatattgttgtaattgctggttctgtatttataatagggcaagaaaaggcaatgtatacacttgtagctgtgttcatcggagcgaaggtgattgatttcattgtagaaggaatggatacaaaaacggctgttacgattatttcgaatcaaccagatttaattcgtgaagctattacgaaaaatatgacacgcggtgttactgtattagaagggcgcggcggatatactggtaaaaataaagaagttttatatgttgttattaataaacaagagcttgttaagttaaaacaagttattagccgggtagatgaagatgctttcgttgttatacatgatgtacgtgatgtacttggcggtggctttaaagcaagctaaaaggtgaacgagtaaattcgttcaccttttttaattcttacaaaaatgtaagtgtaatgtaatgagattcaatagtagattttattccccctttttaaaatggatgtatatatatcctgcagaggaggaatgtttattatgaagaaaaaaatgatcactactataatagcgatgatagtgatagtagtaatgttactgcctacgaaacttggaccggttatcgataaatataatccattttataagacgaaagaatactatacggttgtgaatacaattggtcagcatattggtgatgagtggtatgaatatgaatttattgcattcgatgaacgtggtagagagcagaaaataaagaaaacggttaagcatatgttaaagagagatgaagcattaaaggtttttgcaaaaggacgttacggtgaatcgattgaagagattgaggttgcaaatattcctataaatgcgaagagtaaacttttaacgatgagatagtaaaatatacccccagctattttttgtcgaaaataaaaataccaggtaagggtattttaggagttaataaaaaagccttagtccatatagactaaggcttttttattatataaaggggaagggggtacattgtagtagcatggttgaaaggtataagaagagtagctactagcaatgcaatttggttatttgagtgttcttcttatttggcttactttctaactttattgtacgaaatataagtaagggaaactatcgaattacattacacatagcttacaaacatgtaagtcttctgtaatgtaattcgatggttaaaagatagtgaattttatatagtgtaattagaaagtctcactgtattactttccgtttgtaatataaatgaagaatgaaaaccaactactttttaatagccctcatctgtatgtagatgaggctctttttataaaccttacaatattgtaaggtttacgtaagttaattcgatagtaaatttgtcatattttttgcataatagatacagatagaaaaataattagggatctagtaagaagggagaaaaatgggatgcgtaaagaagaagtagtgaagttaccaattaaagatttctgtagctactttactgttgccgtagtgtgtattggattatttgatatcataacaaacttaattgttaaataatatagatgctaaaacaagaaaggaagtcctttcttgttttttttatgggggcataaagatgaaatggattgatagtcatatacatgttgatcaatataaggatgaagagaagaacagattactgaaagaggtggaaaatagtaatgaaataaaggggcttattgctgtatctatgaattatcaatcttgtaaggaaacgttatctttagcgaagaagtatccctttatatatccagcgatagggtttcatccagagcaacagattcataaagaagagtgtgaacagatttataaacttattgaacagaacgcagaggaaattgttgcgattggtgaagtaggtttgccctattatttgaggaaagaagatgaaagcattgctgtagatccatacatagctgtattgaaaaaatttatagaactagctagtaagtataatttgccgattgtattacacgcagtttatgaagatgctgacactgtatgtgatttgctagagaaatataaagtttcacgtgcacatttccattggtttaaaggaagtgatgaaacaatgaaacggatgatgaagaatggttattatatttcgattacaccggatgttttacataaggagaagattagaaaaattgtttcgtattatccgcttgaatatatgatggtagaaacagatggaccgtgggaatttcaagacgatgttatgacgcacccgagaatgattcgagatgtattaaaggaaattagtgttataaaaaacatatctgttgatcaggttgcagaaacaatatatgaaaatacaagtcgattttatttgaaaggataggagaattatagttttaatcatgtaacggaaaaagtgaaaattgaatgtatttaataaaatgccacggtttgatatatgacaaaaaaccaccaagcgttccgctcggtggttttgtattaggattctaatttcttcgcacgttttaataataaaagaaagacaatgataacgaaccccagtataaggaagaagccatattgctttatataatcaattatgtcattcgcactggttggtttttcaacgtgaatgccgtctttattcgtcgtaatatgaatatctttcatttttacttcattcttttccttttgtaaatcaatccactctatatttggaatactttctagatcctttaatacttcttttaatggtttcacacctaagtaaggatgataaaatgccccaataatcccatcggataatttagaaacagatagagcacgttctttcattttagcaatagtttgtggcgtatcttcttcaataaatccgactgtttcaggcaatagtttcattccatgtaaaaatgacggagtacttgtataatatggtgagtgcatggatttccaagttgtatcatttaactgtagttgtcctacataagttgaaaagtaccttgataatatttcatatcctttttgagacatcgtgtaatgaggtgcttcaaaggcaacaggatatagtttagcatctacaagttcttgaattcctttttcaatatgatctttcgtatatttcccctcgaattcttcccctttttttacatattggttatatgcctctatatttggaaagtcatcttttgtcttcggtttttcatgcttcggttggcgaattggttgatctgttttgacatcccaaaattcaaagccctcacctgtttcactgtcataaaattggtgagtataaccatgcataataattgctgcaccatcatcttgcatagagcgtaaaagatcaactagttctggtttatcttttaaatgtattatctttcctgtatctggatctttatataccggaataacagtaatcatgtaaggcatctttttctcttttagtaattcagcaatttctttcaattgatttatatctgctgctgggtgaacatcctcaagacgtaaataagcttcaactttatttttcgttggtttttggctgaaataagaaaataacatttcaccgacgtaatgagacatccagtcaaagaggttaggtgttgcaacataataagatatttcatgctgaacgattagtgggttagtgttatttgagcttaaagcgttagcaagcacagttccattcgtatcaaatgattgaattaatcgttcctcttctaaggtattttttagcttcttttctggatattcaattttattaactcgtatatcgtcactcttcaatgtaatgaaagaaaaacgcttagataattgttcaacattttgtcctaatactaatacaggaccggagaagttttctagaaattgtttcgtttcatcagaaaacgcttcttttgtttcaccgatataaacaatatgtgtataggaggatacgttattaattgaagttgcttcttttaagttttttagggttatatcatttgtaaaatgtcctaattgagtattaaggatttggacattatttgaaactttatcgtcttgtgtactatacaaaacaagtacttttggttttgatgatgtttgtgcagaggtgtaggtagggatgagtagtaaaatgctgaacaagagtgttaggcattttttcattttgtacgctcctattctatatatagagttcagtttacaattatatacaaaaaatgcgttatagtctatgaaagttacattttttcacatatttaccagctgttttttcacaaaatcggtctaaagcatgatgataatacgtatagttatttgctatgataaaagagtaatagaatgtaggtaattgtaaagggaaggctgaaaggggacaaatttcagcggagaaagaggtagaggtagtgaagaaattctttgtaggatttttagttgttcttggagtatatttatatttccaaggaaagtctgaaggaatggataagctagtgaatggaacaagctatgttgattcagaagaagcaaaacagatgaaacaaatcattatagaggaagcgaagaaagtaaatcttccagaatggatacctcttgcaattgccgagcatgaaagtcgattaaatccaagaagtgttggagataatggaacttcattcggattgtttcaactacaccgcggcggcgggcttgcaccagaacatttaactgatgatgagctgaaagatccacgtacaaatgcgcaaattgcaatgccgcatttaatgaaaggatataagcgtggggtgcaaaaaggtttgactgattttgcattactgaaatatatagcgaatacatctggatggccagggaatttagggccagagtggacggataataacatgaagtataacatcggactagaagatgtgtactatcgaaataaaggtgtaataaagtgaaactttaatcagtgggggagtctgttcatcccccgctgattattagtcttcaccaatcgggcttttacgagcagttaatcttccgcctaaattctagcgttttccggattttgaggtggaagttttactgctcgttaatgcggggtcaaagagtaggttttctatacctactctgtttttttatgaataatttcatccttttctttcgtgaaatactgcgtgagttgtattttcacctcttctagttttgtagaaacttgcggtattttatatcctacatacaatggtgaaacgacaaatctaggtacaactttacaaatgatttttccatttaagtaataaaagaataagttataactactgcatcctttatggaaatctatcagtatgtaacgtacagtttgctgaatgtaatttgccatttcatctatatatgaaatattatcaatgattatattgaattcagtgaagccaataatgggacgctctgaaatattaagctcaatgcgttcatttttttgaacaattaccccttgaaaattttcttcttcaatattttcaagataatctacatatttcattccgataatttgcatgtgtgcatgatgcaaacttccacctgaaaatggaccgtgatttttgtataaaattacagatgcaaattctgcgttcttctgtaagtgtaaccaatgttgaatagaaaattgcattaattttcgcatatgttcttctgtatatgttgcgatatgatcttcgcaattatccgtttcaatcagcaccgtttgaaatgtatcttgtaatgtaggaaatttattttttaaccaaataatagaaccatcagttgctaaaatatccgttaaatgttctttatcgcaaaatggacatgcagcgcttctattccgaatactttctggtttttgtttaccgatatcgtttaaaaaatatagttgttgtgtatccatttgtatatatgcccctttaaaatatgtgtaaaaatcccgcttaatacattcgggaaaaggagaaggaaatcctctaaagacaatatggaaaaaataaaagacaagatatcctcattacgatagggtaccttgtcttttattttttctctaatagtgtgtatggataatatagaacattttcattatttttcttttttctattttttattgtgtataaagtaattgctgtgcttgcaattataataatggctttcttcatattcatatacccctttttattgttggtttaattcttggctaactgcttttgcatcgactaaagcgtgtaaaatcattttcaccatgttcatcatatttcttcactcctttttatagttcatttagttcttttacaactgcttgtccgttcactaatacctcaaagattgcttttacgatttctttcatcatgtttgtttcctccttgtgtttgtctctcttgttttacatctttattgtatagggaggcatcttttcgtactatcgctttccattacgtgaacataacagttttgtaagatttgatgtcacttattgaaatgtttagtctatcttcattattttcagaaaaatgactattcaaacatgaaattggaaagtataataaagaagtaagtattaaattccgtacgaaaggggtgaatgagatgaaacgttctttagctgcgcgtgccaaatttttagattttatctatttttgtcgtgcgatttttcatgatgtagttgttaacgggatacgtatgcccttttttaacaattgcatagtgactattgaacgatagaaatctcttcacccatttttaataaacgtgtgaaaagggagctatttggcttcctttttctatgccgaaaaccatggggaatgtttctttctcatggttttttatattgaaaggagtacggaaaatgactatttgtagtgtaaataatgtaacgaaatctgttggtggaaacatcatatttgaaaatatatcgcttgaaataaagaatggtgaacgtgttgggttagttggtcgtaacggtagtgggaagacaacaatctttgggcttctaacgggaatggagagtttggatgcaggagccatccatatgaagaaaggtacacgtattggtcatgtcgcacaaattccgaagtttgatgaggtcatgactgtatatgatgtattgagttccgcttttaaagtagaaaaggaattagaaaaagaaatgcatgctctagaaaaaaatatggcggaggagcaggaacaatcttctttgcaaaagctaatggagaggtacggaataattcaagaaaaatttgcatttctcggtggttatgaaatagaggcaaatataatgaaggtagcaaatggcttacaagtaacagacttatttccaagagtatttacggaattaagtggaggagaacagacgaaagtaagccttgcatatatgctattgcagaaaccagatttacttctattagatgaaccaacaaatcatttagatttgtttgcagttgaatggttagagaaatttttaaaagaatataatggaacagttatggttatttcacacgatcgctatttccttgatgaagttgtaacgaaaatttttgatttggaagatggagagattcacgtgtaccatacgaattattcccagttcgttgaggagaaggaagaaagattacttcaagagtttcaagcttatcaagagcagcaaaagaaaataaagaaaatgaaagaagcaattaagcgcctacgtgaatgggcaaatcaagcgaatcctccgaatgaaggattgcataaaagagcgaggaatatggaacgtgcgttagagcgtatagagaaattaaagagaccgattttagaaagaaaacagatgggtcttcagtttgaagggcaagagagaagcggaaaagatgttgttgtaatgaaagaagtgagtaaaggttttgctggccgatctttatttgaacaagcgaatttacatgttcgttttcaagagcgtgctgctatcgttggtcgtaatggtacaggaaagactacattattaaaactactattagaagaaataaatccagacgttggtgaaattcgaattggtagtagtgtcaaaattggttatttatcacaacatgcatatgaaaatatgaagagtaatgtattggaagcgtttagagagtatgtggctgtaacagaaggagaagcaagacatatattagctaagtttttattttatggtccagcggtgtttaagaaagtaacacaactgagcggtggagaaaaaatgaggttaagacttgcgcaacttatgtatcaagacatcaattttctaattttagatgagccgacaaaccaccttgatattgaatcaagggaagttttagaggaagcccttgagcaatataatgggacgattttagctgtttcacacgatcgatattttttaaataagttatttgaaaagacgtactggattgatagatgcaaattatttgagtttgcaggaaattatgcatgggctcgtcaaaagtgggaggaaaagattgagaagcaagtaataaagcagaaacgccaagggagaaaaagtgttgaaacggttcctgtaaaagagaaagaagctaggaatcttgaagagattgaaaatgagttaatgcatgtagaagaagatatatatgcaatagaatgtggaatggaacatgtagctgatgttgaaaaacttgaaaaattatatgaggaaaaaacgaagaaagagttgttacgagcagatttatataatgaattagagaatattgtggagtaatgagtagaaagccacttcctttcagttttgctggaggaagtggctttcttcataatgatattttgctttaaaggttaaatgaagcgatgtgtttcacgtgaaacagtaacttaaataaatccgtgttcctcaatttgcatagcttgtgaaacatatgaaaataataaggtaaaaaataaatgtcattagtggtttttggataggcgtaattacaaaaacaaaggctaattatttcccgagagataaagtgagggattttacgggcaccccgacccagacctaacttcttttgctttcgctgaattttgaggtgggggtcttactgcacggcaaatagcgggataaatatgtgtaacagagactagtgaatggaaacgaaaagagagcaaagttacagctttacgcgctgaactctgctctctttttgcgtggcatcttctctcgttgaaattataatagcgatcccgagcataataaaaaaagctaaaaagaggacgaactttgggaagaacgggaatagtaatagcgctccgactatcataattgttaataatacgtagtgcaggacgtattggaataggttgtccatattttcgccccctttttggtaattggttattagtattctatgtttcatgctgaaggaatagaagtagatttttaagttttaatacgaattatagctgagttttcttaaagtataaatgtagagtgaaaattttggaaaaattctcaaaatatttatttagaaagaattgacaaaacataatgaacgatataagctaataaccataaagtctaccggaaaagtcggaataagattgttacccctcaaaaacatctatttttttctgattaaaaccgacttttccgattggctataaatgtgctgtgggaggcatacataagctaataagttcaagggtataactattaaacagttagggtggggacaatgaagaaaaagacaaaaaaatgggctggtgtattttcagtattactgagtagttcgcttgtgttatctgcttgtgggggacaggaggatacggcttctacagagccggttaagcagcaggatttaaaaaatgtgaaaattgaaaagattgccgcgacagataaaacgaaagtgccagacaaagcgaagaatagaaaagatacgttagtagttggtattagtaagccaggcggcgtatttttaccatactttcaacaaaatggttgggatggaaacgtaacttcagttatttttgcatctctcgtatcaaccgataaacaagggaaaccaattccagaattagctgagaagtgggacgtttcttctgatcagttaacatatacattccatttacgtaaaaatttgaaatttagtgatggatcgccattaacggcggatgatgtagctttcacattgacgcttttacatgataaggcatatgaaggtgaagtagatatctctcaatatgccgttaaaggtggtaaagaatataaagaaggaaaagcaacttcaattgaaggtattcaagttgttgatccacaaacaattaaaattacaactgaaaaagtgaattcacaagctatatttgttttaggaggtacagtactatcaaaagcttattatggaaaagattataagcaaaatacaagcttagattacttaaaagatttatatggaaagccattagctgcgggtccatataaatttgaaaagtatattccaggtcaagaagttcgttttgttgctaacgaaaattattatgcgggtaaaccaaaaattcaaaactttatttataaaattacttctggtgatacgaagcttcagttattccaaacaggagaagttgaccatactggcttaggtaccggtgatgaggttcttgaacaggctaaggctttagaattcgcaaatatccaaatcgaaacagcgccgtcatttagttatatttatatgaataataataagccttacttaaaggataaaaaggttcgccaagcacttatttacggattagaccgcaaaaaatatgttgatacagcgttaaaaggatacggtacagtagccaatgtaccaattcatccaacttcttgggcttatacggaagaaggagttaataaatacgaatacgataaagaaaaagcgaaaaaattattagatgaagcagggtggaaagttggttcggatggaattcgtgaaaaagatggtcaaaaattaaaactttcttatttcggtccaagttcggctaaagatagtgatttattaattccgattgcgaaagagaattataaagaaataggtgtagagtttaatcctgaatttatggactttaatacgatgctttctaaggtaaacaaaggagattatgatttagcttctgtttcgacaccgattacaagtgacccgagtgaaacagctggtgaatatttgtctactgcaaatgaaactagtcttggttataagaatgcaaaagtagatgagctaattcaaaaaggtattgaaactgtagatatcgaaaagcgtaaacctatttataaagaattgtataaagaattaagtgatgatccaccagtaattctattaaactaccgtagaacaattactggttataacgggaatataaaaggaattgatcctgaaaagtacaacagtattagtgcaaacttaccagtattatcatttgaaaaataacgataagaatgtataagtagaagacattttttcattcggttagtaatgtgccgctttgaaaaaatgttcttctattttaagcataagattggagagaaaaagggtgaaaacatatattgttcgtaggttgttacaaatgattcctacactgcttggtacatcaattattatcttcgtcctgttcgcacttcttcctggggattatattgattcaaacccgaaaattacaccggaaagagcagctgaactgagggaattatatgggttgaacaaaccaattgttgagcgttattttcattggttaggtaatgcattgcaaggggactttggcttctcgcttcaatatcaagagcctgtaacgtcattattaaataaatttatttggaattcttttagtgtagcaattattgcattgttttttatttggctaattgcacttattatcggtgtattctcggcgacgaagcaacattctttattcgataaacttgtaacaatcggtgtttttgcagcaatgtcatttccttcattctttatcggcttgtttttaattaaggtgtttgcggttgactttaagttattaccgataggtggaatgattgatgttggcagtaattcaacaggatttgcttacgtgatagaagttgcaaaacatatgattttaccagtatttattttaacacttcttggggtcggctcgcatgcccatcaacttaagaatttgcactacccccaagtgtcaaaaaacgttattctttctaaaaagctagctagaaatagtatctcataaaaatagatacccttggatttataggtacatcccgtccctaaaaacctaacttaatcatacgagggagatgttcaataatggaaattagaaaaaaattagttgacccaagtaaatatggtacaaagtgtccgtatacaatgaatccagaattcattacagtccacaatacgtacaacgatgctacagcagaaaacgaagtagcttatatgattcgtaatgacaaccaagtatcgtttcatatcgcggtagatgataaggaagctgtacaaggaattcctttagagcgtaacgcctggcatactggcgacggtaacgggaatggtaatcgtaaatctattggggttgaaatttgctactctttaagcggtggagatagatattataaagcggaagacaatgcaactatcgttgtagctcaactaatgaaacagtacaatattccaattcataaagttcgtacacaccaatcatggagtggaaagtactgtcctcatcgtatgttggcagaggggcgttggaataactttattgaaagggttcaacatgcatataatggaggtagtagtctaattaacctaactcctactccatctttcagtggtgaaacaggtattgcatatatcggaggaaatagcgttaatcttcgtaaaggtccaggtactggatacgggattattcgtcaattagggaaaggagagtcctacaaggtatggggacaatcaaacggctggttaaaccttggtggcgatcagtggatttataatgattcatcatatattggttatagtggagaaagtacaccgacaactgcacaaacagtcaatgatggggtaggagtagttaccattaaagcggatgtattgcgtgttcgtaaaggtccaggaactaattatggcattgtaaaaaatgtgtaccaaggggaacagtatcaggcgtggggatatagagatggttggtataatgttggaggagaccagtggatttcaggtgaatatgtgaaatttgaaagataaaacatattatgtaaaagcaaatgcaacctatgtgcatgtgaagtaagagagaagtcggtccttatgataggaaccgactttttttgctaatatgtatctttaaaattctgaaaattatgtagaaatattcttttttattcttttttctacatttttttgttaccctttaatgtaagactattcagaaagaaggaagtgattttatgaatgctccagtgaaggggaatgaacaagttacgaaattacttaatgactggtatcaagcaatgttaacacaacagtatgtaaaggcgtcaaacttgaaagaaaaaattgatcatttaattaataatttacagcatgaaaaagacacagaattacaagaccaaaacttattattatattactctctactagattttaggtataaggttctaactgaaggtattaatatttcaccaagtgaatttgatgaaattgagaacttcaataaaccagtagacaattatttagcgtattactatcacttttataaagcaatacataatacatttttgtctaattatgcagaggctggggaacaatttgaagaagcagaatcacttctaaaatatgtccctgacgaactagaacaagcagaatttaattaccgtttagcaacattctactatcaaacatataagccccttccctctatagcgtatataaacaaagcaaaaacagctttccataataatgaaggctatgagataaacgtagcattatgtgaaaacgtactaggattaacatgtatacagataagacaatttgaacaggctgaagaacacttaaataaagcgatagatattgttaaaaagggtgataacacagaactgttattacgtcttagaaacaatataggatggttatatgctagccaggggctttcggctttagctatccgccacttatcagaaataactgaacatttaccgaaccattataaggctatctttctacaagctaaggaacactataaattgggggaacatacagcggccaataggctaatagaacaggggttaagaacgtctactaaaatagggaatcaagagtatatacacagatttaatatattaaaggaattgaataacaaatctgatttaaatacattagaaagtgtaatagaagcaggaatttcctactttgaagtagaagggttaacaaagtgcgttcaagaatatgctgaaattctcgctactatgttttataaagaagcgaacgacaaaaaagcaagtaaatacttttatatcagcaatgaatcaagaaaacaatttgaagaaaaaggggcgttagtgtgatgaaaaagttaaagtcagtattattacttcccattatggcagtagggtttattgcaatggctgaaggggatacacctgcaccacaaagacctgatttagcatatggtgaggggcatattagtggtataagtaaattagaagcacacggggatcatggcggtgcacccgcttacgaccacggaagaccgcctgcaccagcgtatgaatatgtgaaataacaaaaaagccaactttatttatataatagggttggcttttttggtgctatgatgtttagaatttacttttagataatgcctttaatatcggatttataattctacttattaaacgaaatcccttgaatatagagctaacaactttcataatgttagaatctctttttattttaaacacctactttcgcaattccgcttgtagaataaagttttcttttatactacctttatatgtataccttattttattcttttgataaacctttgtatgatctttgctaaatactgtttcgtcactaagaccaagttcttgtttaactaaattacgttctccaaaactcaatgaatcatctaccgttcctattaataataagaaagcgaatttgaaatctttttgctcagtaaagaaagcatttggtgtcatagctagcgaagcctttttaatatgtttattcttatcggtgtctaagaagataaaaatattatttgataaaccgattgaggttctgccatcttctaatacttcagttgaattaattttcaactttgttttttctcccatttcttttaatgctttttctattctttgtttgtattcatctactgttaatttagtttctttattttctgcaatcgcaggtttagtgctatcctttttattgccactaacaccagcagcaacaaaaattattaatagtgcagtaataatccaaacccaccattttttataaaacggttttttcatataatttccctccatagatttatacctaaatcataccaatttcatgcaacaactgtaaatggttaagtttctggtttgttgacaaaacagaacgattgttctattatttttatacaaacaaacgttcttgtggaggtcatcttatgaatcatttacttaaatgctctttcaatcaaaaaataccaattgaattaatatatttaaacggttcaggagatttctctcaaaggactgtgattgttagaaaagtatatgaagatcgtatattggtgtattgcatgaaaaaacaacaagttagaacactgaaattagctaatatactatctgttgataaagtaagaaataactatcaatacgcttaaaacacttaatgaggtgattatcatatggcaaacggagtaccaaaaccaccaaagaagaaaagtgcttcaaaaaaggaacctagaccatacatggatgaattcgaacagcaagaagctgctgaattaattcaatatgcaaagcaggatgatacagaattagtctttactgtgtatagaaaatataaagaaccagatatcattcaaggaaaaatcgttaaacttgaacaacaaatgggtagaattgtagtgagtaatggcccgaatataatacataaaattcaattcatggatattttgaaaatcgaaacgcctagttaatttagctaggtgtttttatatggccataaattctttatcaaagtagaacttgtccattaagttgtttacaattccgttgaaataagcgaatttacccttgttcatttttgttcccgctttaattttcataacaaactctttgatagcttgtaagccaatagtaagttcctggtctttagtaaatgctttatcacctgttatatggttaacgattttattacactgtcttacgaccttccacagttcttgaattgttttagattcactgtaaaaagagccaactaaagaaataaaacgctctggtacccaatgagcaacaaagtcagcttgttccatattctcttctggagtattgctattctcattactattacgtttatttatatcttttatattttgttttaaggaaatagattttgttttattggtgtgacactttttttcatttttaacaggtgcttgtgtgacaacctgttcctccacaatgattggttgaataacaatagcgttacatgtttgtctcatatcgattttacgcttcatttctagctgtttaataatacctaaagactctaggtgtaggcatactctaataaccgttctacggctaatattaaggtcttcagcgatgtgttttttcgttctgaaagatacgccaaagaacttagaagaatagttgtgtaatttatttaatacagttaattgagttttgtttaactgatcggcgaatttctctttgtacgcccgaacagttttatttaattcatcaatagttttgaatgttgctagatttttatatgtttcattacctgcaataattgtaattccttgtttcttttccatagtggtttgtctcctttttggaaacaaaaaagcaacgtcaccaatttggtaaacgttgcttaatagaccctgcatgatgtaaaatagctcatgagagtatagcaagtgtttacctggcctaatcaggtggacggtatatagagtgttcgtagcactttacatacacgctgtgctcttttgttttgtgtagattttgcacgctgaaataattttgcatgaattttgcacgattacttctggaaatctaaaggagccttgatataaaagggatgttttactattagttcgaatccctctgggcgcgtcaaaaagtcctaacttacgttttgtaggttaggactttttttatttacctcttgttatatctagtaataagatttactattagtacttgataataatttttaattttattattttctttcaatattattcaaatttcggttgtaagttgtaaatctcattaatacatataaattaataatattttggaatgggtgtctgcgtgaggattctccttttaccaaacttattgtacaatagaaacaagggggagattagtttgaaggcaagtcttttacaagaacaaagcttacgtttggcaatgacacaagagttaaggcaagcgattacaatgctccagtataatgtacaagaattatcggagtttttgtatgagcaatcgttagagaatccccttattgagttaggtggttttgagagggagaagaaaaagagctctaacaacagtaaaagtaccagcaaacaagtcgagaatcagatggagatctacagtgtggattctacaacgattcagcaacatttattaaatcaaatacagtattataaaatagatgaagaagagcgaaaagtagcttctttcattattatgaacatggatggaaatggatatttacaagaaacgaatgaagagttagcagagctcctttctgcacatattcatgtagtcgaccgttctgtagagcttgtccaatcactggagccagcaggggtaggggcgcgtaatattcaggaatgtttaaccttacaattgaagcgcttacaaagacgtaatggattagcagaagaggttgtagaagatcatttcgcttattttgtgaagaaagattggcgaaagctcgttcaagtgttgaaatgtagtaatgaggaattgcagagtgcggtaaattgtataacgtcattacaaccaaaaccaggtcttgcgttttcttcagataaaccactttacattgtacctgatatggcggtgaaaaaagatggcgatcgcctcgttttacaaatgaatgagagaaatatgccgagaattgaaattcattctgaatatagtgcgcttcttaataatagtgaaagtgaagtagcatcttacgtatcagaaaagtatcagcatgtgcagtggattatgcgcagtttgaagcagagaaaacagacattgctgcaagtaatgactattattatggaaaaacaacgtgatttcttctggaaaggtccagagtatttaagacctctcgctttaaaagaggtagcggaagagttaagtgtgcatgaatcgacaattagtcgtgcgacgcgaaataaatatgtgcaaacaccacacggtttatttgagatgaaatcgttctttagcaatgccgtttcgacgactgaagatgaagcagtttctacaaaacgtgtaaaacaatttattcaaacgctaattggggcagaggataagaaaaagccactttcagatcaaaagatttcaaaattattagaagaagagcatgaaattgttatttctcgaagaacagtggcgaagtatagagaacaaatgcatatcccagcttcgtcattacgaaaaacgatcggataggtgaagaagatgaaagttgtactgtatactaaaaaagattgtggcctttgcgtgaaggcgaaacaagttttacaggaagtacaatgtgaatattcttttcaaatcgaggaaatagatatatatgaagataatgaccttttagaaaaatatcacttaatgattccggttgtagaaatggacggaaaacaagtagaatatggtaacattcacaaaggtgtcataataaactatataaagaatgcagttaagagttgaataagtttctatctcctgttacaataatacacgtagcagggattatttttttaacctatgtgggacacaaaatgtcactacgggacgtaaagtgaccacgagggaaaatgaaccgatgtagtgaggagaaaagatatgcgctcatggattcagaatacaaaaaaattattacctgatctgctacctgttatgcaaacgagaatgcaaattcttcaatacattaggctcatgcagccgattggaagaagaaacttatcagcaagtctcggtatgacagaacgagtattgcgaagtgaagttcaagttttgaaagaacaaaacttagttcacgtcgcttcttctggaatgactttgacagaagaaggaacagctttagttcttgctttggaagactttatgaaagaaatttccgggttaaaggttttagaaaagcaacttaaggaaacattagacttggatgaagttttcgttgtccctggtgatagtgatgaatcaccttgggtcaaactggagatgggccgtgcttgtgtgacttgtataaaagaccgtctgacagcgaataatatcgttgctgtggctggaggaactacgctagctgctgctgcggacatgatgcaacttgattgcaaagatttacatatgctatttgtcccagcacgtggtggaattggagaaggtgttgaattagaagccaataccatttgtgccaagatggcgcaaaatacgatgagtaattatcgcttattgtatgttccagaccatgttagtagcgaagcatatgcgtctattgtgacagagccttccgtgaaagaagttcttgagttgattcgatcttccaatatcgtcattcatggaataggtgatgcgttaacaatggcacgtcgcagaagtacttcagaagcagattggttaaagattcaggcaagcgaagcagttggcgaagctttcggttactactttaatgaagaaggaaatgttgttcataaagtaagaacggttggtatgcaactagaggacttacaaaatgtatctcacgttgttgcagtcgctggaggttcttcaaaggcaaaagcaatacaggctgtaattaaacaagggcacacttcaattctaattacagatgaaggtgcagcaaaacagttaacaaagggttttaccctttaatataatcccccaaggaggaaattcaaatgactaaaattggtattaatggatttggacgtatcggacgtaacgtattccgcgcagctcttaacaactctgaggtagaagtagtagcaatcaacgacttaacagatgctaaaacattagctcaccttttaaaatatgacacagttcacggaactttaaatgcagaagtatctgctaacgaaaacagcatcgttgttaacggtaaagaaattaaagttatcgctgagcgtgacccagctcaattaccatggagcgactacggagtagaagtagtagtagaatctactggccgtttcactaaaaaatcagacgctgagaaacacttaggtggatcagttaagaaagttatcatctcagctccagcttctgacgaagatatcactgtagttatgggtgttaaccacgaacaatacgatgcagctaaccacaacgtagtatctaacgcttcttgtactacaaactgtctagctccattcgctaaagtattaaacgaaaaattcggcgtaaaacgcggaatgatgacaacaattcactcttacactaacgaccaacaaatcttagacttaccacacaaagatttacgtcgtgctcgtgcagcagctgaaaacatgatcccaacatctactggtgcagctaaagctgtagcattagtattaccagaacttaaaggtaaattaaacggtggcgctgtacgtgttccaactgctaacgtttctctagttgacttagttgttgaacttgacaaagaagtaacagttgaagaagtaaatgcagcattcaaagcagcagctgaaggcgaattaaaaggtatccttggatacagcgaagagccattagtatctatcgactataacggatgtacagcttcttctacaatcgatgcattatctacaatggtaatggaaggtaacatggttaaagtactttcttggtacgataacgaaactggttactctaaccgcgtagtagacctagcagcttacatgacttcaaaaggtctttaattcttaattatataagttatcaatgacaaaacgagggagagggtttgttccctctctctcttctttcgttttaaaagcaaatgtgttaagcttttgagtgggttttgtcaatcctaactagtagtcggagggaaatccaatgaacaaaaaatcaattcgtgacgtagatttaaaaggtaagcgtgtattttgccgcgttgatttcaacgtacctatgaaagaaggcaaaattacagatgaaactcgtatccgtgcagctcttcctacaattcaatatttagtagagcaaggtgcgaaagttattttagcaagtcacttaggccgtccaaaaggtcaagtagtagaagaaatgcgtttaactccagtagcagcacgtttaggcgagcttcttggtaaagacgttaaaaaagcggacgaagcattcggaccagttgcacaagaaatggttgcagcaatgaacgaaggcgacgtattagttcttgaaaacgtacgtttctatgcgggcgaagaaaagaatgatgcagaacttgcgaaagaatttgcagcacttgctgacatcttcgtaaacgatgcattcggtgcagctcaccgtgctcacgcttctacagcaggtatcgcagactacctaccagcagtatctggtctattaatggaaaaagagttagatgtacttggtaaagcactttctaacccagaacgtccatttacagctatcatcggtggtgcgaaagtaaaagataaaatcggtgtaattcgtcatctattagacaaagtagataacttaatcatcggtggtggacttgcttacacattcgttaaagctttaggtcatgaaattggtctatctctatgtgaagacgacaagatcgaactagctaaagaatttatgcaacttgcaaaagaaaaaggcgtaaacttctacatgccagttgatgttgtaatcactgaggaattctctgaaactgcaacaactaaaatcgttggtatcgactctatcccttctaactgggaaggcgtggacatcggtcctaaaacacgtgaaatttatgcagatgtaattaaaaattctaagcttgttgtatggaatggaccaatgggtgtattcgaaatgactccattcgcagaaggtacaaaagcagtaggacaagcattagcagatgcagaagatacatactctgttatcggcggtggtgactctgcagcagctgttgaaaaattcggtatggctgataaaatgagccacatttctactggcggcggtgcgtcattagaattcatggaaggtaaagagcttccaggtgtagtttgtcttaacgacaaataagtagcagccaaagaaaaaggacggtgcaaagcatgcgtaaaccaattatcgcaggtaactggaaaatgaataaaactctatctgaagcagttagcttcgtagaggaagttaaaggtcaaatcccagcagcttcagctgttgatgcagtagtttgctctccagctctattcttagagcgccttgtagcagcaactgaaggaactgacttacaagtaggtgcacaaaacatgcacttcgaaaaaaatggtgcattcactggcgaaattagcccagtagcacttagcgacttaaaagttggctatgtagtacttggccactctgagcgtcgtgaaatgtttgctgaaacagatgagtcagtaaacaaaaagactatcgcagcatttgaacatggtttaacaccaatcgtatgttgtggtgagactttagaagagcgcgaaagcggaaaaacatttgatctagtagcaggtcaagtgacaaaagcacttgcaggtttaacagaagagcaagttaaagcaactgttatcgcttatgagccaatctgggctatcggtacaggtaaatcttcttcttctgcagatgcaaacgaagtatgtgcgcacatccgtaaagttgttgcagaagctgtttctccagaagctgcagaagctgttcgtatccaatacggcggtagcgtaaaaccagaaaacattaaagagtatatggcacaatctgacatcgacggcgctttagttggcggtgctagcttagagcctgcttcgttcttaggtcttctgggggcggtaaaatgagaaagccaacagctttaatcattcttgacggtttcggacttcgtgaagaaacttacgggaatgctgtagcacaagctaagaaacctaattttgatggttactggaacaaattccctcacacaacgcttacagcttgtggcgaggcagtaggtcttccagaaggtcaaatgggtaactctgaggttggtcacttaaatatcggtgctggccgcgtagtatatcaaagcttaacacgcgttaacgttgcaattcgtgaaggcgagttcgataagaacgaaacttttcaaaatgcaattaaaagtgtaaaagaaaaaggtactgcacttcatttattcggtttactttctgacggtggtgtgcacagtcacatgaaccatatgtttgctcttcttcgcttagcagcaaaagaaggcgtggagaaagtttatatccatgcattcttagacggccgcgatgttggaccacaaacagcaaaaggttatatcgatgcaacgaatgaagtaattaaagaaacaggagtaggacaattcgcgactatctctggtcgttattactctatggaccgtgacaagcgttgggatcgcgtagaaaaatgttacagtgctatggtgaatggtgaaggccctacttataaatcagcagaagagtgtgtagaagactcttatgcgaacggtatctatgatgaattcgtattgccgtctgtaattgttaacgaagataacacgccagttgcaacaatcaatgatgatgatgcagttatcttctataacttccgtccagaccgtgcaattcaaattgctcgtgtatttacaaacgaagacttccgtgagttcgatcgtggtgaaaaagtacctcacattccagaattcgtatgtatgacacacttcagtgaaactgtagatggttacgtggcattcaagccaatgaaccttgataacactttaggtgaagttgttgcgcaagcgggattaaagcaacttcgcatcgcggaaactgaaaagtatccgcacgttacattcttctttagcggtggtcgtgaggctgaattcccaggagaagagcgtatcttaattaactcaccgaaggttgcaacgtatgacttgaaacctgaaatgagcatttacgaagtaacggacgctttagtaaatgaaatcgaaaatgataaacatgatgttatcattcttaactttgcgaactgtgatatggttggccattctgggatgatggaaccaacaattaaagcagtagaagcaactgacgaatgtttaggaaaagttgtagaagcgattcttgcaaaagatggtgtagcacttattactgctgaccatggtaatgctgatcaggagttaactgctgatggcggtcctatgacagctcatacaactaacccggttcctttcatcgttacaaaaaatgatgtagagcttcgtgaaggtggtattttaggagatatcgctccaacaatgcttacacttttaaatgtggaacaaccgaaagaaatgacaggtaaaacaattattaaataatttgcttatataaaaaggagagaatttattatgtcaacaattattgatgtttatgctcgcgaagtccttgactctcgtggtaacccaactgtagaagtagaagtttacacagaaagcggcgctttcggacgcgctatcgtaccaagtggtgcatctactggtgagcacgaagcagtagaattacgtgacggtgacaaatctcgttaccttggtaaaggtgttgttaacgcagtaaacaacgttaacgaaattatcgctccagaaatcgctggtttcgatgtaactgaccaagctggtatcgaccgtgctatgatcgaattagatggcactccaaacaaaggtaaactaggcgctaacgctatccttggtgtatctatggcagtagctcacgcagcagctgacttcgtaggtcttccattataccgttaccttggtggattcaatgcaaaacaattaccaactccaatgatgaacatcatcaacggtggttctcacgctgataacaacgttgacttccaagagttcatgatcttaccagttggtgctccaacattcaaagaatcaatccgtatgggtgctgaagtattccatgcacttaaagctgtattacatgacaaaggtcttaacactgcagtaggtgacgaaggtggattcgctccaaaccttggttctaaccgtgaagctttagaagtaatcatcgaagctatcgaaaaagctggttacaaagctggcgagaacgtattcttaggaatggacgttgcttcttctgagttctacaacaaagaaactggtaaatatgaccttgcaggcgaaggccgtactggcttaacttctgcagaaatggttgatttctatgaagagctttgcaaagacttcccaatcatctctatcgaagatggtttagacgaaaacgactgggatggtcacaaattattaactgagcgtatcggtgataaagtacaattagttggtgacgatttattcgtaactaacactcaaaaacttgctgaaggtatcgaaaaaggtatctctaactcaatcttaattaaagttaaccaaatcggtactttaactgagactttcgaagctatcgaaatggctaaacgtgctggttacacagcagttgtatctcaccgttctggtgaaactgaagatgctacaatcgctgacatcgcagttgcaactaacgctggccaaatcaaaactggttctatgagccgtactgaccgtattgctaagtacaaccaattattacgcatcgaagacgaactaggcgaaatcgctgtttacgatggtatcaaatctttctataacatcaaacgataattgtaggaaataaacgacagaccgtgagaaatcacggtctgtttttttatgctaaaattgttcacccgtcataagtgacatgaaatgtttgaagaagcggttatagtcaaaatcaattgcgatttgatgaaccggccaatcaataaatggcttctggttcactagagaacgaaattcccctatgcttgctccttgtgcagaggattctgtcatgacaacaataggtgatttatgatacgtgaacatagagttatcaaataaagcgagtattggcattgtgtcatggaaggggctcccctttaaatgtggtagggcgtctttataatatccgtagtaataatgatcaaataacggtttgacaagtggagcttttccttttgcctcaatgtattctgccatttctggtgtaatgatggagtattgagtgacgtttaatgggtatatgtacatgttaactgcggattgaaggactatattagcagcagtaggatcgccataaaagtttgcttcggaaataggggtaacattaccaggatgtaaaaaggcaccgcccattacgtagtaagatttaatttgtttcattaactgtttgcacatgataaacaaaattgctagggaggtaagtcttcctaaactcacaatgattaattcatctttatactgttcaataagaggaatgacttcaaaaaaattctccatttctccgttagtcacattcacctttggaataattggaccgagcccctgtttcccatgtacatccgtaaaaaacgcaggtgaggcaccagtaaggggacgttctgaaccaccgaatatcttgatatttctattctttgtttcgttattaaaaaaatgagcattttctacggccgttttttttggaacattgccgtaatcagcaacgataccgacgatttctatttcatcgataaagaatgctaagaggagagccatcgtatcatcaatcccaggatcacaaaaaatgagaacttttttgggcatatgttcaccacctatcttgtttatccggtacaaatccgcttggtgagggctaataattaatggggatgaggaaaacctcaatgattaaagtttcactttatatatatgtaagtttaaggataaaaagattattttattgaaataatagtcttttaaattcagaaaataaaaactttttatattaggtcaaggtttttgacgtaattttcgtttagaaatgcagtcatatcaaggttgtaagcgtataacataggctgtttttgctgtcaagttgataaattgcagctttttacaatttatactatgataaagatattaacagaagatcgtataaacatgagggatgatgaacatgaaatttacaaagattcttgtccaaattgctgctctttacgtgttttatatggttggaacttgggtgcaagaaatgttaaatattccgattccaggaagtttgattggaatgttcctcttacttgttttacttagcctaaaagttcttccagtgaaatggttcgatttaggagcagaaacactcgttgctattatgccgtttttattaattccgccaacgcttggcctaatgaattacggtgctttttttatgagtaaaggaatttctcttttcattacagttgtagcgagtacatttttaattattattgtcgcaggacatacaggacaatatcttgcgaataggaaggaaagagagtcgcgatgagccaaatattaatcggaatcggttgggttctttttacggtgctattatatcaattatctaaaaaaatctataaattatttccaacaccattcaccattccaatgcttgtagcaactggattaatggctttcctatttatcgtgcttgatataccatatcaacattatatggaaagtggtggtggctggattgcaaagctacttggacccggtgttgtagcatttgcaattcctctttataaacaacgtcatgttctgcaaaaatatgttgtaccgattgctggcggggtattagtaggtacaacagttgcaatcgctagtgattttgcgattgcttcacttatgggaacggataaaagcttaatcttatcgtcattaccaaaatcggtgacaatgccagttgcgatgagtgtttctgagcaagtcggtggtgtaccttccttaacagcagctttcgttgttatcgcaggtattactggaacgattacaggacctcttttattaaaatggagccgtgttacaaactcagttggtaaaggtatcggatttggatgtgcttctcatattatgggtgttatgagagcgatgaaaaataacgaacatgaaggtgttattggatcggtaacaatgacattaacagcaattttgacatgtttacttggaccgttatttgcgatgatgtttatgtaatagaagaaaagcgagagcgcctctatagctctcgcttttctatagaatttatgctacagttacaataactgaatctttgtaggaggtacgccaagtgcatacgttattatcagttttacttattattgtatcgattttaatgattgttatggtacttatgcaatctagtaatagctcaggcctttcaggtgcaatttcaggcggtgcggagcaattatttggtaagcaaaaggcacgtggaattgaagcggtattaaaccgtattacaattgttttagctgtattgttctttgtattaacaattggtgttacgtacttcaatttatagaattgaaagaagaagcgttagtgaatggtactaatggttcttctttttttgttttgctatttgaaagatgtttctaattagattatagaaatacaaatatggtacactagatatagaaagaatacgactagattacagaagagaaagaggagaaatacatgatgaaattagcatctccgaaaccatttacatttgagggtggagaccgcgctgttttattactacatggattcacagggaactcagctgatgtacgtatgttagggcgtttcttagaaaagaaaggctatacttgtcatgcgccaatttataaagggcacggtgtaccaccagaagagcttgttcatacagggcctgaagattggtggcaagatgtaacggaggcatatcagcttttaaaagataaaggttttgagaaaattgctgttgttggattgtcacttggcggcgtattttctttaaaattaggttatacagtaccggttttaggtgtagtaccaatgtgtgcaccgatgtatattaagagcgaagaaacgatgtaccaaggtatattggcatatgcccgcgaatataaaaaacgtgagcaaaaatcacctgaacaaattgaacaagaaatgttggaattccaaaagacaccgatgaatacattaaaagcattacaacaattaattgctgacgtacgtaacaatgtggatatgatttatgcgccaacatttgttgtacaagcacgtcatgacgaaatgattaatacagatagtgctaacattatttataacggtgtagaatctacgttaaaagacattaaatggtatgaagactctacgcatgtcattacacttgataaacaacgtgacgagctacatgaggatgtatataacttcttggagcaactagattggtaagatctagttgcctctttttttcataaggaattttttgtgaaaactgtaaaaatcataaggggagtattgaagtttcactttatacatcccctatctttcggatacactaaataatataaggttttaaaggaggtatttttgcttggaagaaatcatacaagaacatattgataagttgttattatttatgagagaagaagcgtataaaccgctaacgatacaagagttagaagaggcatttgggattgaaggttctgagggctttaaagatttcgtaaaggcacttgtaacgatggaagaaaagggacttgttattcgtactcgtagcaaccgttacggtcttcctgaaaagatgaatttagtaagaggtaagttaattggacatgcacgtggttttgcattcgttgtaccagacgagaagaaaacgggagacgatgatcttttcatcccgcctacagaattaaacggtgcacttcatggcgatacagtattagcacgccttagttctcaatcgagcggttcgcgtcaagaaggttcaattgtacgcattttagagcgtggaacgaaagaactagttggtacatatacagaatcgaaaaactttggattcgttatacctgacaataagcgctggacgagtgatatctttatcttgaaaagcgcatcgatgggtgctgtagaaggtcataaagtagttgtgaaaattacgagctatccagagaatcgtttaagtgcagaaggtgaagttattcaaattctaggtcataaaaatgatccaggagtagatattttatctgtcattcataaacatcatttacctttagcattccctgaggaagtgatggagcatgcaaacagtgtaccagaaacgatttcagaagaagatttaaaagatcgccgcgacctgcgcgatcaaatgatcgtaacgattgatggtgcagatgcgaaagacttagatgatgctgttacagtaacgaagcttgagaacggtaactacaagctaggcgttcacattgcggatgtaagtcattacgttcaagaaggctctccaattgatgttgaagcagcggaaagagcgacgagtgtatatcttgttgaccgtgtaatcccgatgattccgcatcgtctatctaacggtatttgttcattaaatccgaaagtagaccgtctgacgttatcttgtgaaatggaaatcaacaacttaggtgatgttgttaaacacgagattttccaaagtgtgattaaaacgacagagcgtatgacgtatgctgacgtaagaagcattttagaagatgaggacgaagagttaattaagcgttatgagccgctcgtaccgatgtttaaagagatgggtcaattggcacaaattttacgtgaaaaacgtatgcgccgtggtgcaattgactttgactttaaagaagcgaaagtattagtggatgaagaaggaaaaccgactgatgttgttatgcgtgatcgttctgtttcagagaagttaattgaagaatttatgcttgttgcgaatgaaacagtagcagagcacttccactggatgaacgtaccgtttatgtaccgtgtccatgaagatccgaaagaagataagcttgagcgtttcttcgagtttgtaacgaacttcggatatgcggtaaaaggacgtgcgaatgaagtgcaccctcgtgcgctgcaacaaattcttgaaatggttcaaggacagccagaagaagtagttatttcaacagttatgcttcgttctatgaagcaagctcgttacgatgcggatagtttaggacatttcggtttatcaactgagttctacacacacttcacatcaccaattcgtcgttacccagatacaatcgttcatagattaattcgtgaatacattattaatggtaaagtcgacaatgaaacgcaagcaaaatggcgtgaaaaattacctgagattgcagagcactcttctaatatggaacgccgtgctgttgaagcagagcgtgaaacagatgagatgaaaaaagcagagtatatggttgataagatcggtgaagagtatgacggtatgattagttctgtaacaaacttcggtttattcgtagagcttccaaatacaattgaaggtcttgtacacgttagctacttaacggatgattactaccgttatgacgagcaacatttcgctatgatcggagaacgtacaggaaacgtattccgcatcggtgatgaaattacaattcgcgttattaacgtaaacaaagacgagcgtgcaatcgactttgaaatcgttggcatgaaaggcacacctcgccgtaagttcaaagatcgtccagtcgttatcgaacagccaagaacaggcagaaagaaacgcggtggacgtagcgagcgcagtagcgagcgcagtaatgagcgcggcggtgaacgtggcacaggtagaaaatttgaccgtggtggcaaaggaaaaggaagaggatctgcatctgcatccgcttctgctagccagccaggaaaaaaagatggtaacggtaagaagaaaaaagcattcttcgaaaacgtaccaggattcaagaagaaaaagaaaaagcgtaagtaagaaaagagtggcttcgctttgatgaaaagcggggccgttttcttttttcttcgtggcttgagagcgagccactttcgctttttattaacatttgttacaatagtaaaaatagaggagggacgttatatgccaaagggtacaggtaaggttattgcacagaataaaaaagcatttcatgattatttcatcgaagaaacatacgaagcagggcttgtccttcaaggaacggaaattaagtcaattcgcgctggacgcgtaaacttgaaagatgcgtttgcacgtgtacataatggtgaagtatgggttcataatatgcacattaatacgtacgaacaagggaatcgtttcaaccatgatccacttcgtacgagaaaattacttctgcataaaaaagaaattgataagctagcgggcgctgcgaaagaaacaggttacgcattagttccacttagaatttatttgaaaaatggatttgcaaagatggcacttggtttagcaaaaggtaaaaagcaatacgataaacgtcacgatttaaaagagaaagaagctaaacgtgaaattgcacgcgcgttccgtgatcgccaaaagatgtaatacagatatttacatttgtaaaatggagcgcgtatgttataataacttatgtaagattgttgcacattgaaaaacagctcttagtagctatcacgatattttcttcgtatgctccatttttatcatggggacgttacggattcgacagggatagttcgagcttaggttgcgagtcgaggggatcggcctcgttaaaacgtcaaagcctataattggcaaacaaaacaatctttctttagctgcttaattgcactaaaggttcctccctccatcgtccatgtggtagggtaagggactcaaactaagtggactacgccggagttcgccgtctgaggacaaaggaagagaacaaccagactagcaacttggaagcctgtcgataggccgaagagttcgcgaaatgctaatatatcgactacactcgtagaagcttaagtgccgatatttttggacgtgggttcgactcccaccgtctccaccaatacatatttggtggtttttttattttttataacaggaagcataagatggccgttttggtcaacttatgcttcttttagtttacggccaacttatgcttccaggatttgaagaatatttttaatgtcgcctttaaataaagtcgcgacttttagggatagcatcacatcatcatcaatctaagaatagcaaataccccaaaacgaaaaaaatgtacatttttttcgttttggggcgttataaaatccttaagttgatgggcatatggcgactcatttctagaattgttttcatgtgtcaatgatagaaatatatttttaattatggctacttttcaactagtacgatatcatcaagataggcatcaccgatgttaacatatccattaatttgtaagatgaccttatatggattattagtatttagagtagtaaattcaaccgatttttgttcatactgtgtggaagtaaacgtcataacaaatgtgttttctcccccaggagactgtgctcctacaaataaggttttttcaggacccgatacttttccagatgcggacatgatgtatgtagtattaggcttcaaagttacgtctcccttaagatgaccagctcctgaactaaaatgaagtcctttagaattatttactcctgcatgctcttcaatattgtaaattaaagagccatatgctggtttaaaaggttctaaacttgaattgtggtcaaaatcaatatttaaaatataagggttctccttctcatttaattgtacattatcaaacttaaccctcccatttgctgtagaagcaagtttgacagcaaagtttgacacatcttcccctgttttaaacttcatctcatgatgttccggcttaaatcctgaatattgcttttttgttaatggaatgatttcttgatgggcattcagattacctactgttacttctgatggagaacctatacttcccgctatatcaaatgttaatgtatattctgtattcggctttacagtaacaggctgataggctgtgtcggcatgtattaatttgagataatgattgcctggttcagaagtgccgatattctcggtagaagaattaggattagataaaatccagttatttagcccatcctcaaaatctccattcttaacttgttcatttgcagatgaactatctgctgatacaatacctgaaaaacctatactggcacttaatacaattgctgtagaaaagactcctataccgactttttttaacaatctcttcatctcctttggtcagattaaaatttactttttcatatttctatatatgtttggataaacctgacaaagaaccattttaacaataaataaattatgtatccgagatttaggttattttcatttgaaggagtagagggagcaaccgtgctgtgaagtgcaaagtagctccatctatccctaaatggtcctcttccacccaaaaacaaggagaacttttttattgctcaagtattaggggtcaccatacatgcccatcaacttaagaatttgcactacccccaagtgtcaaaaaacgttattctttctaaaaagctagctagaaatcttttgaagaaaatttagccataaaaaatgcacctccaattgttagttatgtgtctaacaattggggtgcacttcatatatgggtgtcttttctttgtaataaaaagctctctagaaaagaaagttttgaggcttttacattcaaatcatccaaattagttatttacacagcactttatttcttctcatccctcatactgtaatagcccaaattaataataatcaggaaatacccacccataattccagctgcaaatgtccacatgtactcacggtgttcaatttcatacataataatcgcaccgagtatggcggctgcaaaccgattcatcatgccgagcattggtgctttttctttttttacgatgctatttccgaacttttcgatacgccttcctaaaatccaggcgcagtacatactcactaaaaggccgatgcttatccctacaaactgggctggaaaaggtgtcagcaaccatcccaataacatcacgcctaataaacaatatatttgtatgttgaatgatcttaatgccatacgaatcatattatgctccttatctttcctattaatcccatctttcggacttcaagctttccgatatatcttttttaaaatgagggaatttgattttactcaccattaaataagcgagtacgcatgtgccaaatgccacggaaactgggttatttaggaggcataaaatgaggagacacattgccgcaaatggaatgggcattccgatgaatgttgggagtttgctttgttgcgtgttaaatctagcaagccgcagcattccgcaaatactataagcgagcgcacatatcatcccgataaactgcaaatcttttaaagcgacactataggcaagaatagatggtgccacaccgaaggtcactaaatccgcaaatgagtctaactctccgcctatttccgaagcagcatctagtttccgagcgaccataccatcaaacagatcaaataccatacctgtaataatgaacataactgcaccatgcatatcgtgaacgaaaacagcgtgaatagccaaaagcccacacacaaaatttgctatcgtaatcatatttggtatgtaactcatcacacgcttctcctcctttctactaattgcttcatcttcattcttactcattagactcaagatccttctgcttttcttccaatatcactttatttattttcgttaacgtatcagtcatttgctgcaacgctccaatatcaattttcgagaaatatttctcgatcaatacatcatctaactcagacaatctttcgatatatttactaccgtttggaccgatcgtaaggaaatactcccttttattgttaggattcacttgtttcgaaatcatctgttgcttttccaatttcgataaaacttggctcacagcacttttcgttatattaaacgtactcgcaatgttatttgctgtcgtgttttcatttaaatgaatatgaaataacatgctctcttgctgcccagtaagaccgaactcatcctttaaatcttgaaatagtaaaatatagagttccgtataggctcgattcatttcattaattacttctttatacgttctagtcatagcatcctccatgcttttatttcgttttgcttaatagttaagtttacttaacttaactatattataccgttatgtttgtgtaaagggaaatataactctacactttactcacaatgatacaaaaaagaagacactcttctaaaacatgtttagtcgcttctgtctcactgctttcctcatccaaatacttggcaagtcattctgaataatcaaaaagaaaatcaacaaaattccatatagacccattactggttaaaatgttataatggaattaccctacatagttactcatagccagactgaggaactagcgtcttattaagtaatgcgcataactaaaataaaaaagacactttacggtgtcttttttatttatattcctaggaattatctcttttataaacagactctatcaaacagtaaaggagactaacagatggaacatcctgttgcaagagaattacgttttatacgggtatgtcttatcattttgattattgtcattgcgttttgggaccgggagaaaactgtagaaattactgatcacggtagcgatcctatcttaaacaccagcaatatgacccaagttggtgagaatacatttgcatacaaagacgaatcaaatcaaattaaaatatttaagtttaatccagatacaaatgaaatatcacttattaaagagtttcgtgctgaggaatattactcagatacagctaaataaagtaatattgaccacaaaagtataatgaccaaagcctttagccatcattacgactaaaggctttttgtatgtaagtaaatgaaaaaggagctaattttatggaacataataaaaatggaatacttgctttaattgttttatttttaggattagtgttttttgttagtggaatggtttatcatttatggggctcattttaatttcaacttttagacggataaataactcgaatcagagaaatgcacaatatttccccttttccttccaaaattaatataataagatataaaatgtaatacatataaagacaaatatatagcactcattaaagtgcttctattttggaaggaagaaacgatgaacaaaaagttattagcctcattattatgtagcacattcttgtttggagtatcagcttgcggttcacatgatgcgcctgcgaaaaatgagcaggcgacttctaaaaaaacagagaatgacaaacttagcagcaaggattcgcaaaaagaacttcctaccaatgtagattcctctgatgtatacatgtcaatgggatctgccgagtcattagatgttatagggactggagaagttaaagcacaaggtgtctttaaagtattagacatcgcagtttataatcgtaaagaagaacccattacactagatattaacaactttaaattaattgatggatttggaagagaatatcacatttctaatgaatatcaatccgtacttaaagctgcaaatacgtctacatttaaatttggtattgttaaccctgatgaacattcggacggaaacattgtattcgatgtaccgaaaaacacgcgaggattaactttaaaatttaataatgataagttagataaagagctccaattaaaagtggaattggaataggcaaaataaatacgtctcccttaacattctctactaacataaaaaagtacagtcttttctacagcagactgtactttttcatttatcatttcacataacattccctaatttttttgactagatgctctccaatcacgaaaggatgttgggcgtccagaaaaagctctttgctttgtaacagatggtttttcttcaggagtcattgttttttctttaagcgtcgctggtttttctttaagcgtcactgatttttcttcaagaatagtcacagctgtttgcattttctctaactgttctttcaacaattgttgttcaatctttaaatccgtaagtaaacgtaaaatcatctcagaattagccataagatcctccttcccccaatacacagaataaaatacaatatgtagaaggggggataccggtgacaaaaataaggtcgtcaactctttttaacttctaaaatccttttatttttttaaggacctgctccattcatccttaaaaacataaattaaattaaatccattaataaatggtctttatggaaggaggagttaatatgggctatggcggtagttgtggtggaggctgtggtttcggcggcggatttgccttacttgttgtgctcttcatcttattaatcatcgttggcgctagctgttggggcggcggattcggctgctaaggagaggcactcttgagagtgtcttttttttggtatgtggctcgtatacatatttaaaaaaatttccgttctagaagtactataatattagcttaacatgtcagttccccctaattaataggtggttctagcctatagaattcttttaaatataaaatgaaactatatttctcaatgaataaaacaatttaacatggtaaaataatatttggatgggagtccaatatattattaaaattaagatggttcaagtcgaaggaaggcaccttagggtgtcttttcttttttataaataattataaagtaaaattgcaaaggatgcttactacttacaaggaacattttcttccctacaactatttatttgaaactaattactattataaatataaagaagttatggataaagtagtgaggtaaataaaacaaaatatagatttaattcatgtttctcaacgaggtaccaccagcattttcaaaaaaatacgctaagcaaaaaaaataatcagctgtccatatggacagctgatttacatcattacatttctattatttatcttaccacttgtacagatactggtttccacccctgattttctacccaatcaatattaaccttatattttttattattttgcttatctcgtacattaccgtaggctttattattaccattattcccaataaaatcgaaaatcaattggctctctggaacatcaacagcataagaaattgcttttttcatctcactccaatctactgttccttctttaaatttcatttcaggttttgctccttgctcggtaccaattggcttccaagaaggattagtttgagaacccttttcttgagatgccgttttttcttcctcattattttcagttccgttcgtttttaccgatttttctgtttttgatttctcttctagctgtgctgcctctttatcttcagttttcttctcttctatctttgctgtttctttatcttcagttttcttctcttctatctttgctgtttctttatcttcagttttcttctcttctatctttgctgtttctttatcttcagttttcttctcttctatctttgctgtttctttatcttcagttttcttctcttctatctttgctgtttctttatcttcagttttcttctcttctatctttgctgtttctttatcttcagttttcttctcttctatctttgttactttcttttcttgagcaattgctttcgttgatgtattagaaggggtaaacaattggtatgtcactataccaactgtcactaataccaaagtaaatgcaatattaaaaattgccttttgacgacgattctgttgtttttcttgaaatctgcttacttgtcccattcttcaaacctccgtgtttactttctcctctactctttatgtattatccctaaaattcttaatatttttattaaacaatagaaataaactacactttccatacaggatttcatatcataataaaatttgtgttttttcaagtatctgacatatgttattcaaaatagtttaatacattaaaaatagataagcttctgcacttaagaaactttcaattttattcaaaggtgattccaattatgtccatattagatctcctgtagaaagctttttaacaattaaacctcttcttcccttatttataatttttaaattaaatttccctctatagtataataaagatgtttcgttttctaatggggtatgtcgtaaaatcaaaagggattttatctcttttaccttcttttcagagtaaatttcaccactaggaaattctattattcctaatgtaatctttaattcgctctcatcgaaaggccactccttattaagttcccttatcttttgtataaagcttcttttggtttgtcctatatatagcaatgttacactcttagcacatactctagagattgcaaatatccccttcttagaagcttcttccctattataaaaatcatttatactatacattccataccatttaatatgtactgtttctatgaatctcacctcatttttagacaatattataatttctgaatgttcaaattataatgggcgcatagtcctgattacttgaattataaattgtgcttttcaataatacattttattattactaatttcaataatacaaaaaaaatacaatattatagtttaattacaaaactttataaaaaaacaaagtgatgtcgtaccaaatattatattttttcaatatcagactatcgtgaacaaaagttagagagttatggaataaaatataatttgtatgtacatacatttctttaaaaagaagttttgtagtttacaactgaattaaaaaaacatagatttttatgactctttcggagatataccaagatggaatcttttatatgcacgttactataccgaactttcggtatagtatttttttgcagctccttgatttttcaccaaatacgtataaaaatcaatagtaggaaaataaactgctggctaaaagtttactttcgataaaataaaaaaggacctgcaaatctgcagattctcctgataatgattatataagtatagtatcatccatttatttgactattattcggaaagtataaaactgttcactagatagcagagtatttttacatattgtattaattccttcttcaaaaatccccctaaaataaaaaatacgctattctttctgtagaatcataggaaagggtggtatttttgtatgtctatttctgtatttgatgaattataactatttgctcaagaaattcaaagctttttatggactttcttttattatatcggtttcacatatttcctctaaaatctctaatacttgatttttcaattcagccatttacttattttctatgacttcttattctttttcttttataggaatcattgcaagaactgttaaatctgcattcgttaaatcttttatcacttgatgagaagcaaataccggtagcgaaacaataaaaccatcatctacttttgtaatatcattatgtgtaacatactccagaaatactttatttgcagccgctacaaattcttcatcgcctgttccatcagggtatgatacaccaatttcccctaacataatataatattgctttttaataccagtcatatccattggatcaatggattgaattttgtaatttaccattccagatttcacttttctttcaggaatatctaagtcaaaaaactctccagcttcttccaaaataatattgatatctttgattgttgttatagcattagttgcttccttaaaaaacatgagttgctctcttgataaaacaatattttcttcctctttcttaaactgtagattttctaaaatatcttctatttcttctacattttccagaaaaaatatatcattctccatatgaggaattaattcttttaagtttatcaaatacatctgtgaatattttatattcatctctttcatttcacgtaatttgtctagaaattttaataccttagctttacgatatgtttctgccatcattttcacctctcgttacattttgtatacaatctgtatacagattgtattggatttgcaagtattaattttaaaatacaaaattaattggtattgtttaaaaatttttattatagctatcatgaatttactaatacaactccacctataaaggttacgattctaaaaaatattagattttcaaacattcttcttcgcctgctgaaactcttacagcgaaacggacgaaaatccccatcgatacagggagaaaacagtctttaatatattaggtgtcgtttacaattggaccatgtctgataattaagccgcttaattttaaaaatgaaacccgttaggatttatttgatatgcagaatccccaatgatttgcactggtttttagaataagaaaaaatcccttctgaaactgccctttcttagccttagcttgatagcaatgtggcggtacaccatcgctatcaagctaagactttaaagaagcccctaaacgataattttgtgttttttacagcaccgaagttcatttttatagtttttgggtaaccttttttgttagggtgatagatatgggggctaagtcataaatgtttaaaaaagagctcgtcctatcttttctgtacgagaaacaagatagattgacctagtactgtggaaatctttaatgggtacagaacaaagagataaatgacctatgtgttctgaaattgttcgaaacacgctcttactttatttaattgattcattcttttataaaaaagtctgttcatttctatgatccttcaactaacgccatccacccattgaacaaaaaggaaaaagtaaagttaactctttttcccataaggaataatgactttgttcagtaatcattatcattttgctaatgtaatgaacttactttattaattttcaacggataccctcttcattaatcgctttaatttattttctgtatccgtttcccctactggcgtatagatactacaccgtaaatccatatcaccttgaacttgaaaagaagttaaattaaacaacattttgcctgctttagcatgtctgaattcaattatcatgtctggagccttactcacttgactttcttgccataaattctggaattctggatgggaacgactcatttcttcaataaactggctgtaccattcatcgtctaaatagcgtccataataggtacggaaaatagcaagaaaacctttcacgaaatgttcccaattgacggccaatgcttttaactcttttctagtgaatactaaacgaatcaaatttctttgattatttggtatttgttcaaaatctaaaaaaacatgagcagctgcaggattccagcccataatatggcaatgtcgatccgtaatgatagttggacaatatgttaattcatctagtattcgtattaaagaagggctaagctttgattgatccttttttggacttgtactttctgaatttgtttcgaatgccaggtcatataagtagtctgtttcatcattatttaattgcaaagctttagaaatacaatcaagtacgattgtagaaacctttatatctcttccttgctctagccatgtataccaagtggtgcttacacctgctaactgcgcaacctcttctcttcgtaacccaggtgttcttctccggtttccggcagacaaaccaatagactctggactaatttgggcgcgcttagcttttaagaatgccgacagagctttaagccttgttttattattcatttttaaaactccttatcttatcaatttatcctagtagtagttatactaggataaatccccccttgtaataggataaattgactgtaaaatacaagtatattattgattggagggattgcaaagtggaaagagttgtgattactggtatgggcgtagtttctcctataggaaacgacatcaaaacattttggaacaatctaattaaaggggaatctggtatagtcaatatcgatacttttgatgttaccaatcataaaacaaaaattgcaggtatcgtccaagattttgatgcagatgaagttttaggaaagaaagaagcaagacgtttagatcgtttttctcaatttgctttggctgcagctgaacaagcttggtcagattctaagttagacctcgatcgtatagatgtagaaaggttaggcgtatacgtaggttcaggtatcggagggattgaaaccttgattgaaaatgttgatgcacttaggcagaagggaccaagaagagtcagcccaactctagtacctgccataatgtctaatgctgctgcagcacaaattagtatcaagtggaatgcgatgggaccttctatgtcacctgtttctgcctgtgcaattggaaatacatctatcggggaagcctttagactaattcgttctggggaagctgacgttatatttgcgggtggaacagagtcagctataacagacttatcaatagccagttttggtaacgctacagcattatcaacaagaaacgataatcccactaaagctagtcgtccatttgatgaaaatcgagatggatttgtcatgtcagaaggagctggaattctaatcttagaatctttatctcatgctttacatagagaggcaaagatttatgcagaagtcattggatatggtgcaagttcagacgcataccatatcgtagctacacatccggaaggtaaaggtgcttatcttgcaatgagatcagctttaaaaaatgccaatatatcgcctgaagaagttgatgttattagtgcccatgcaacaagtacaaaagtgggggacatctctgaaacgatggctattaagcaactgtttggaaaacaagcttatcagattccggtaacagctaataaatctatgcttggtcatatgttaggggcagctggtggagttgaagcaattgctctagcaatgagcttaaaggaagggacagttcctccaacaattaacttagaaaatcttgatccattatgtgatctggattatgtaccatctgttgctcgccaagtgaaaataaatataggtctatctaactcatttggtttcggaggtcataatgcagccattgttttaaagagatacgagtgaataaatttctctcgtaaatttaaccgtttactctagaaacggttagatttatttaattaaaaaaaggaagagagagtgagaaaatgaatattagagtagcaactgcattagactaccctaatttaagaaggatatatttagaatcacggcgtgaaagttttcattggctagatagaaatgaaatgactgtagaagattttgataaacatactgaaggagaacatatactactagcagaggaagataatcatatcctcggatttgcttctttatatttacctgaaaactttatacacaatttatttgtacatcctgagttctttggtaagggggttggaagacagttacttcatgcttccatagaaaagatgaatataccattaagattaaagtgtgtttctaaaaatcaaaaagcattaaagttttatgagaatatgggctggaaaaaagttattgaagaaggtgagctagaagaaaaatattgggtaatgatatatgagaggtagcaccacatccatcaacttaagaaattaggtattccaaaaacaaaaaataagctaagtgtttttatattttgttttatatttatataaaggtgagatgaaaaaagacttaatccttatgaggaatttaagtctttttatagtgttgttattaggtgtcctgccagcatttcggaaaaaaaacacgctaagagtatgcaagaacttatgcaaaaaatagggagacatcgggaactataaggaagccaaaaggcgccccagaataagaatgtatataaagatgcatagagtcatagaaaaagaaaaatcccttgtgagagtaagggaacgtctttctctttgctactgataatgagacgttatgttaacttcatatgcatatggtatacatccaatttttaatcatacataaaggtattcaaataaaaagtctatcgaatttatcagaatattattacaattaaaaggaaggggtgaaaacaatgaaaaaaaacgaaaaagattctacagttatgttctcttagcatattattcttaattcctatgggatgttctaatctttcttcatcaaaacctactgatacaaaagaaagtgcaactatccaattaaaagagaaagatatacaggaaatcagattagattccgctggaaaagatagccactctaaatcaacaacagacaatgaagaaataacaaaagctatcaaaacagctatcgaaacaggaacacctaaagaaatctcactagataaacaaacaaaagattcaatccacactaacatgacagttacattaaaagatgattccaaagaacaatatttcgttttgatcaatgataaaaacgaaattacaattgctaaagatacagacaaaaaacatacacaaggtattttactaaacaacaaagattctaaactgatagataaatttttcacaaacaaaaacagtcttgattaatcaagactgtttttgttgtttaatagaacttttaaaataacttccgctaacgaaaattatgtaaatgagccgtccgtatggacggctcatcgtattttttgcttagcatggggtttttccaaaatgcagacggtaccccatgcccatcaacttaagaatacaaaccagccccaaaacgaaaaaatgagcttttttattacaaattagcataaaatcttgttttgggatattataaaacaacatttccctaaaatgaaaaaaatgctattctttatatatatttctccagcaagaatagcgtttttttatatcgatggttcttctatttaattacgatagataatttgtaattagcatgttcgtttagttgagttaagaattgatcaagggcttcattagatggaaacttacactctagaagataacaaccttcaccgctaattttgaagttctttatgatatattcgtgttgtgtttttacaaatgataaataggaactgtgttgaatgctccttgtataaatatttataaatgcgtgaacatagtaacctagttttctttcattcagtttaatcgtataaccttctatgatgcctttctcttccagccttattactctagatgaggttgcttgccctgtcagatggactttttctcctaattccttcattgacgtacggccatttttcaataacgcttctagtatttttttatctgtatcatctaacaccgtgacacatcctttcacatttcaagtcaaaccttataaatttttgattttatctatgtaacatgatttctctcatattttatactattgttgaatcatataaaagggaggaataccgcatggatattagacttatacgtaatgcaacacttgttgtacattatgcagacaagaagtttttgatcgatccttttttagctgacaaaggatccattccaccgtttccaaatacaccaaatcaagatatgagaaatccgttagttagtttaccaatttctatagaagaaattattcaggttgatgcggttatcatcacgcatttacatcctgatcactttgacgaagttgctaaaaaagttttacctaaggatataaaaatctatgcacaaaatgaacatgatattgaggctattaataaagaaggctttcacaatatagaatctttacagcatgttaccaacatagaagaaattaagctatttaaaacaaatggacaacatggaactggcgaaatcacaaagtttaccggtgaagtatcaggtatcgtatttaatcatccagacgagccgagattgtatgtggcaggtgatacaatatggtgtaacgatgttcaacaagcaattgacacgcacgaccctgaagttattgtgatcaatggaggtgctgctcagtttctagaaggtggccctattacaatgacaaaagaggatatttatgacacaaaacaggcagcaccacaggccaaaattatcgtttctcatatggaatcacttaaccattgcctattaaccagaaaggaattgaatgactttattgataagaaaggattatctaacactattttagtgccatctgatggggagtcctattcgttttaaagtggtgcagttaacctaaaccagaatatcaaaagcccgcttttgattgatattatcccctttaggtagacagtatgaaaaagaccatgtatacacatggatgttacactaattgctattaagctaagataaatctgtatccataaaacaaaaaagcgctattctttttgtagaaatatacagaaaggatggcgtttttgatgaacccaatcatctcaaatgaactgaatcttttcgcacaagaactacaatactttttattaattttgaatattaaaaccataattaacaagtatatcaatattgagaaatttattacaaaattaactataaatgattcaaaactccaatgtaaacttttatccaaaagtttacttccaaattagaaaagattaggtccttaatttgctttaccccagccataaaccttacaatcaaaaacaaaggataattcaactatcaaactcatataaaatgttaatcttgtctaagcattcattaggatatacaattgatcatctatttttctttacataatctccagatacagtccatatcaactatagattcttgccttatgctaaatgtaatcaaaaagcaagtagataaagataatgactaaaacattaactctagatacttttttgatgaatattacaaataaacaggaggtaatgaaaaatgattaaaacattattagcaggagcatttttaagtacaggattattagcgggtggtgcaattggtgcagatgatgcgaaaacggacaatttaaagtcaaatgaaaattcaaatcaagtaattacacagagtgcagatggaacaacgtcttcctcacaaaactttgatttacctaaagatgcagtgccagcatctaaaggagatgtaaaaactgttgaaaaatcagaaggtacaggtacagattctcaacaaggaaaaatggtagaaacaaaagaaggtacagaatcacaacctggaaaacatgcaaaaactgttgaaagaacagaaggtacaggtacagattctcaacaaggaaaaatggtagaaacaaatggaggtacagaatcacaacctggaaaacatgcaaaaactgttgaaaaatcagaaggtacaggtacggattctcaacaaggaaaaatggtaccaacaaatgaagaaaattaaataatatatagttataacgaagagcatcccaaaaggggtgctctttttatattatagagattaactagttttactcaacatagaggtgtaggaggaattgagggttagaacatggggtactgtttcttcaaattatggtgtttagagcaatagttttggtggtaacgttacaatacaaacagtttgttagaaatttttttaatttacatagattctagatagactacatataaacttcagatacttgttttatgatacaagtaatcaaacaaaaggagggggttacaacagtattaacagggcacgccattagtagatggagaaaatgttgaagatgtacagacagataaaaacatattccatataaataaaatgaattgcaaaaagctaaaagtacggttctaagaagtttgagttataaaaagaaaatagataagtatagtgaaaatagataaattgacaagagaaaagcactttgtgtacatcacaggtcctttttatttttattttgatctaggacttgaattaaacttttatactaaaatatatataggagaaggtggaagttcattgtacaaaattatttatggaatattaattttaatttatactttgtattcattttttctaagtgatggaagtgaagtaaggtttattatggtgttaactatagtacttatcttttctgtggttttagaaaaaggaaatgtaaaaaaaaggattgattaaaggtcgtttttttttacaactcgttgcatcgcatcctaaaaaagtatcaatttcacaagtcaatcatgttaagttccacgacaaatacaatatagaagcaatagaacagataattgaggtggatgcactatcggacagcttacgagagttattactgaaacgattaaataaataattacaccaccaaacatctattcccgtattatgtatgggcgtgtttgcattatttacagttaaggtgaataagaagtatggagcaaaaaaggcaattctagcttgtcttattttaattggagttgcaacatgtatgagagtttttgcttattcagtttccacattactgattagctatctatttattggtaggggtctcgccacatcgctaccaacctaagaaaacagttcacccccaaaacgataaataagctttttcgttacaagaaatcctaaaaatttcgttctgggggtgtattaaaactttaggttgatgggcatgtgtctgtacccctaatttaagatgatgtcgtacttcctcttcaatcagattcggctatacttattctaactttctacctgttaataaactttacaacagacccctaatttgcaagctggcggaacaaatcgaaatatcatgctttcccatcaaataacaaacagcaacagtactttaaatttaattcttaggatatcgctcttttacaagttcttcgatgttaatagcttttttaatttcttctgatgataaccaaggtgtatatcttgttccattcttattgtctaaatatatcttaaattttttattatatagttcttctttaaggattgtggttaccttgattaaatctttaattacaaggggattattttcaaattcattactactggtattaataactaaatacaccttatatcctcgaacatccccatctttcaaatttgaataagtaataccttccaattcaaaatgattgttttgaattgcaattaatctctcttctatttttgtatgatttttaatccaattttccaaataaatgtctatggcattgcccatcgtttttttcattgttagtaacagctcttcttttgttatcattttttgcacatttttaaaaggtccacctaaagatttgccattataatccttaatttcaagttctgttatctttttattatttttctggatgagttgaaatagagtatataaacgatctaattctactgattcaaattggctaaagtcaatctcgttactcatttgcaaagttaataataattcattagttggttttccttcatctgatcttctatcctctgacaaatattgaagagtgttatcagttttagtttccacgtaccctaatttttttatttcttctagagttggttggaatttctgatatgcctcaaatgttttttttccatatttgtattcatcactttttatggatgaatagaagagaccatctacctctactcgaaattgaatatttttattattctttgcttgcacagtatggtatgcatgtcccatattattttcatttaaagggctcatatgtgttacaacaacatcgattccgtgtttttcttttatatatttttgtacctcatcttcattaacttgattacaaccacttaaaaatatgaaacatactactagcaatattacatttttcatgcttttcatataagcactccctacgtaagattaattcttgaatatgcagcacactgcaaagcactctttccttagtcgtatacttcaacttttatatagtgtgaatcttaaatcatttaagttcttgatgttcccatctatactgcttgtaatattactgcattaaaatatataacttatttgtttcaaggtctttctcagttctaaaagcatatggttcattgggcaaatatctaaattgtacattcataccatgagacctattttactataaaataacgaaaaaatacgctattctttctgtagaatcataggaaaggatggcgttttttatgtctgtttctgtgtctaacgaattacaactatttgctcaagagattcaaagtgccctatctccaaatgccttacgaaatcttgctagagatgttggctttgtacaacgaaccagtaagtaccaagcaaaagatttagtcgctttatgtgtatgggtgagccaaaatgtagctatgacttctttaactcagttatctagctgtttagaagcatcaacagaagtactcatcagccctgagggcttgaatcaacgatttaataaagcggctgttcaatttttacaacacatattagctgaactactaaaccaaaaactgacctcatctatgccaatttcttatccatatacttctgttttcaagcgtattcgtattttagattcaactgcatttcaacttccggatatattttcatcaatttatcctggtgcgggaggatgcagccatacagcgggagtaaagatacagcttgagtatggtttattaagtggacaattccttcatattcatacaggtccaggtaaacaacatgatcgaacctacggttccctgtgtgccccaactgtaacagcgaatgatttatgtatccgagacttaggttattttcatttgaaagatcttcaacatatacaagataaaaaggcttattatatctcacgtatcaaatcaaatacacgtatttatcaaaaaaatctaaaccctgattattttcaagatggcagaattaagaagggtacagagtatatccaaatagatatggaggttttaatgaactctcttcagccaggacaaacatatgaaatatccgacgcttatgtgggaatgactgataaagtgccagctcgtgtgattgttcatcgacttacagatgaacaacaacaaaaacgattacgtgatcaagctatacgagaaaaaaagaaaggaatgaagtattctcctcgtagcaaacgacttagtggtatcaatgtatatatgacaaacgcctctacaaatattgtcccgatgggacaagtacatgatcggtattctttacgttggcaaatcgagattttatttaaaacatggaagtcattctttcatattcaccattgtaaaaagataaaacgtgaaagattagaatgccatttgtatgggcaactgatcgccattctactctgttcgtctactatgtttcaaatgcgtcaattacttcttatgaaaaagaaacgagaactgagtgaatataaggccatatatatgattaaagattacttttttcttcttttccaatcgatacaaaaagacacccaagagctatcaaaggtattacttcgcccgttcaacctcctacagcaaaacgggaggaaatctcatcgatatgagaagaaaacaatctttgatatattaggtgtcatttacaattgtaccatgtttgataatcaaggggcttaaatcaaaaaattgaaacccattagggtttatttcgtatgcaaatctttaaattccctacacatagctttaaaaaaaagaaacaacctctactataattaacgttgtatggacttaacttgatagcgatgtggtgctacccctcaatgaacaaaaaaattagcatagtaaaatagtattcggataggagtccaatatattattaaaattaagatggttcaagttgaaggaaggcactttaggggggtcttttctttatttttaaaaggacctgctccattcattcttaaaaacataaagtaaagtgaacccgttaaaatacatgaatgaaccttagttttaatcctcttacctaaaggaggaactattatgggctatggtggtagttgcggagaaggctgtggttttgctggaggatttgctttgcttgttgtactctttatactattaatcattatcggatgcagttgcttctgctaaaaaactattagaaaggacactcttatatgggtgtcttttctttatgaaaaatatctaactatcaaccttttccttatgacttctaacatcaacaaagggtgatacaaactattacatatgtttgtaccaccctttattgatgcgtttagacttcacagttgttaaagttttagacttctcccttagtgtacccatattattagaacatcctgtaatctgtagacaaaatgtagctaataaaaacaatattaataatttcttcaataaatcctcctacatgcataaaacaccatatgttacaaaacaaacataacatcaactctttataaaaacaatataatcctcggtccttaagctatctcttaacataggagtaccgctacatattcatacagccaaaattttaaaatatcctctacttaaggaatttgtaagtatcaagtaagaaaaacgagagctttgcttcgtataatcaaaatataaagtgaaggaagaaagattatttctgggattaatatgcatgtaacaagagaagaaatttacatttttttagaataataatattagtatgtccaagttttggagattgcttgcaaatattttgaagttttcgcaccagaattctaattaccatacctgttttgtaccatcacatattggaggttgaaacatgaataaaaaaaagaaaatacaaaaatcagtccttacctttaccctactcttttctttaggcgtttcatctttcccgcttacaacaactattcacgcagatacacatgaggaacaatctgctgaaaagaaactagtctctttaatggagcgtacatcattattttttgaatatctccagcaaggtaagtatgcagaggcaatacagttgacgtctgctgcttttcaatccaagtttacagcaaccacattacaaaactggtggacacaaagtggctggagcaggataaaaagcatgggaacccccgtgataaaagaacgaaacttggtccatcagacggtagaaattccagcagctaccgaaggaactaccataccgctactccttaaattcacacctggcgggaaagtagatgaagttggagaaaggtcacccgaggaatattttaccatcccccatcctagctatgatcaacctgatttctatcaagaacgtgaaatcgtcattggaaattctacctatccgttaccatccacattaacagttccgaaacataagcgtggtgaaaagctgcccgtagttgttcttgttcatggtgctggcatccatgatcgcgatagcacatatatgggaacaaaaatcttacgagaccttgcggtgggcctttcatccaacggaattgcagtgttgcgctatgaaaaacgcaccttagaacatgcattaaagatgagtgcagaacctgttacgttagaccgtgatactacagatgatgccatatatgcagcaaagtcagcagtgcagcaggaaggcattgatccaaataatattttcattcttggacatagcctaggagctggcacaatgccacgtatactaagcaaagcaccttcctcacttgtccgaggaagcatcttactcgcaccacctgcacgccctttgactgacattgccattgatcagtatcaataccttaggaaaccaaaggaagaaatcgatgaactaaaaagacaggctgcttttattcaggatcctactttcaatcctgaccatcctccagctggctacaattttgggtcacctcattttatgtatgatgtttctaggttgcgtccagttgaagaggcaaaatcacgaaaagagcctttactcattctgcaaggagcacgtgattatcaagtaacagtaaaagatgaatatacaaaatggcagaaaggactttcaaaccgcgggaatgttcagttcaaaaaatatccgaaattgaatcatttcttcacggagggtgacggagaattaagtcttcctagtgaatacgaaatccctgctaacgttcccgaatacgtcatccaggacattattacatgggttaacgatacaaaaaaataagaaaacatcaaaagccttcatgcaatcatcattgcatgaaggctttttgaaactggtgattcagagatagctattataatgcatcaaaacgaaaattatatttttctacgtactaaataaaatgctaaggaacccataataacaggtgcaacgaagtcaaagaaatgtgaaaaagtaaaagtaaaaagaaaaagatatagtataagtgtatagatcaatgctagtcctataaataaaggaattccaaattgaaactctctacatcgtttaattttcctatataagacttccccaagtaaacaagctataagagctggtatactaccataagtgacgatagtttttatgaatccctgtaaaacgtccgggtgaataaagctaggattaaaaatatatgaaattaagaaccatccaaaaataaaagcaaatagacttgcagcataactaactacaaattttattaaagtaagcaacgtaatcatccccataatttcctaatattatcttcattgtatcattttctcttaaaaagactccaaaaggatatacttgcccttcagctttcttttttaacacttgttcaagacgtattttttgatgttattttgtataaaaaacttttgctatcaacctgttctgttaggttgatagcaatgggatgccgccacatcgccatcaaccttagggcgctaagaggttatatgtgaggattattcctttaaatttctacgactgttctaaagataggcataacaaataaacctattaactgggcattttaaaaaatattatgcaaccttgaaactttttgacaacatataatcatacacaacacctaaaatatcaaaaacggttttcttttcataccgatgagattttctcccgtttttctctaaaaggtaaaacaaacgcagcaaaacttttaataattcatggatgctcttttgtagtccctcataaaacaattgataataattctttatcatatagatggatttgtattcacttaactctttctttttcttatccaagagtaactgacgcattttgaacatcgtcgataaacagagtaaaatactaatgagttgcccatataaatggcattctaagcgttctttcttaatttctttgcacctgtcaattttaaaaaaagatttccatattttgaacaaaatttgtcgggtaaaagactggcgcggtatcagttgtgatccgtttccagcctctccccataagaactgctcgtgaggttatactgtttaaaagtttgttcatttcaattaatggaaaaccgtagagtttctatccttaagttgatgggcatggggacgctacaacaataacgaaattacaagagagagatgagaaaaaagagtgagtaaagcactatgcgtacgcatagtgttttacttgtggtaaaataagagcaggaaactcctaaaggttgtattttactaaaggagagaaaagtaaaataagaggtatatgcatatatgaataagcgaacagcgttaatacttggtgcaagtggtttagttggacaagagataacgcgtctattacttgaatcagattactacgattcggttactatttttgtaagagagccaatgcaattgcaacatgagaagttacagcagaaacaagttgatttttcggtattagaggaatataaagagttctttgctgtggatgatgtttttagttgcttaggaacaacaataaaaaaagcaaaaacaaaagcaaattttaaaaaagtagattatgaatatacgttacgagctgcttgtttagctgaaaaacaaggggtacaaaatttccttgtcgtgtcttctatgggagcgaatcctaaatcattcttcttttattcacaagtgaaaggaaaaatggaagaagaattgcaaaagttagtgattggtggtattcacatttttagaccatcattattagtaggaaatcgacaagaatttcgtttcggcgaacgaatggctgaaaagttatctcgtattattccgtttatctttaaaggagctttcaaaaaatataaaccaatttcagctaaagatgtggcgaaagggatgtatataaccgcgctgcgagaagaatcgggtatccatacttataattcaaatgaaattacaacgatagaataaataaaaccgagaagaatgacttctcggttttatttattcgtatgaatttttcctggtgctcgcttatattggtgaggttcttgcaattcaaagccaagttcattggccgctattcttggaaaatacggattgcgaagtaattcacgtccgataaaaattaaatctgcttcgttattatttaaaatttgctctgcttgtactccggtcgtaattaatccaactgcaccagttgcaatgttagcatgctctttaatatgtttggcatattgtacttgataaccaggatacacatcaatatgtgctggtacaactgcgccagaactacaatcgattaaatctattccctgttctttcatccactttgtatactgaacgtaatcttgaaccgttagcccgtcaggatgataatcatttgctgaaatacggacaaataacggtccgtcccaaacttcatttacagagtcgatgatttcgcgtaagaaacgatagcggttttcaggtgaaccaccatattcatcagtccgcttattggaaagcggagaaagaaattcattaataagataaccgtgagcaccgtgtatttcaataacatcaaatccagcttgttttgatcgtactgcagcttgctgaaaagctaatacagtatctttaatttggtgtttgctcatttctattggcattttcattgtttcattaaatggaatggctgaaggagctaacgcatctgtttctagttctgcttttcttccggcgtgagcgagttgaatggcagcttttgcaccattatcatgtataaaagtagtcgttttatgtaagccttcaattaaactgttatcccaaatgcctaagtctttatttgaaattcgaccttcaggtaacacggctgttgcttcaatcataactaaaccaacttggccggcagctcttgttccataatgaatgagatggaaattcgttacttggccatccccgttttccgatgaatacatgcacataggtgacataacaatccggttttttaatgtaacgtccttaattgtataaggtgaaaaaagttcggaattcatccaatagcctcctagattgaattttcttacattgtatcattctcttttttgtttctctaataaaacgcttatacgaaaaattttgtatattcgtgttacaatgactaatatgaactgaattggaggatggcatatgtaccaggcttattatgaaagcgaagtaggtttgcttgaaattacagcgaatcaagaaggaattacgtctgttatatttgttgatgaacgacaagaagaaaataaaaatgaaatgatagaacaatgtataaatgagttagatgaatattttaaagggaaaagaaaagagtttacggtcccgctgtctgcggagggaacagcatttcaaaaaaatgtatgggatgcactttatactattccatacggcgtaagtgcttcatatttagatattgcagagaaagttggaaatacaaaagctgtacgggcaataggaggggcaaatagtcggaatccaatttcaataattgttccatgtcaccgtgtaatagggaagagtggaaagcttgttggatatgctggtggtttatggaggaaagagtggttattaaaacacgaaggtattttgaaatgacgtatggatgggaagagggattgttttgaaatgtataaattgtgggcaaccttgcgaggaggaacagttaaattgtgcaagttgtcagcgaaacttggataatgaacaagatgaaggtagctcgttaatagataaagaactagaagtatatgtagggagacaatatccgtattacaaaaggaaatgggagcttgagaataagcggattgctaggtggagctggaatggttgggctgctattttcaatataggctggctaggatatcgtaagtattatgtaccagctgctttatttatgttgttattagtagcgtgtgatgcattttcgtattatatgggatttaatgtagcgttgccaatcattaatatggtgcctcttacgtttttattactcatttttattctgtttggaatggggatttttgcaaatggattgtactatcaatttgcggaaagacgtatataccgaataaaagcaagagaaataaaagataaatcagttgaaaactatctaatcaatgatagcggcggaacgagcaaaatgggagcgacaattgttactattttagcagttgctagcatattttttagtcatttcttttttccgactgatcgagacgttattcaaaaggttcgtacaagctcgctttatgaatatcctttcttttcaataggtgaatctttcgaaaattattttcaaaattcaggttggatatattatcgtggaacggaagggttagaattagtagaattccaaggatataacaccggaacgccaagacaaaaggtgaagattcaatttgttgtcgattataaattaggtgaagtggaaccatactcatttatggttaatggtgaatctaaaactgaagaagagtttttgaagctaatggaagaaatatttaaagttcaaaatccatttgatatagaggatggattacaagtaaatgctattcaagaaagcggctggaaagaaatttccgatcgcttttttctatgtttgttaaaataaatatttaaaataatcagaatcttttgtataataaaatatattatataggatttaacttatacatatagattgggggaaggaagaatgaagagaaagacaacaacaattgctgcacttgcgttaacgacgagtgtattggttgcagggtgtgggaatggtgagaaggcttcgacaacgaagaaagaatcgaataagggaatggccgataaacaagttttaaatttgctagaaacagctgaaattccttcaatggatacatctaaatcaacggattctgtatctttccgtgtatttgtaaatgcaatggaaggtttatatcgtctagataaagataataaaccaacaccaggtatggcaaaagatgtgaagattagtgaagataaaaagacatatacatttgaattacgtgatgcgaaatggtcaaatggtgatccagttcgagcacaagattttgtatatgcatggcaacgtacattagataaagcaacagcggcagaatatgcattcattttatttgatgtgaaaaatgcacagaaagtaaataaaggagaattaccattagatcaactgggtgttaaagcgaaggatgataaaacgttggtagtagaattagagcaaccagcaccttattttcttgagcttacgtcgttccctatatttttcccattaaatgaaaaatatgtgaaagagcaaggagataaatacggattagaagcagataaattagtatataatggaccatttacaatgagtcaatggaaacatgaacaaaattatcagttaaagaaaaatcctaattattgggataaagatactgtaaagttagacgaaattaatgtaagtattgtgaaggaaacaagcacgggagtaaatttatatgatagtgatcaagcagatcgagttattttaacttctgaatttgttgataaatataaaaagaataaaccagatgaatttaaaacgaagttagacccgcgcatatatttcttacgttttaaccaaaaaaatgcaacatttaaaaaccaaaaagtacgtgaagcgattgatttagcatacgataaaaaaggaattgctgatgtcattttaaatgacggttcattgccagcatatttcttagtacctgaaaaattcacgacaggtccggatggaaaagatttccgctctgtaaataaaaacttccgtgatagtaaagataacgcagagaaagcaaaaaaattatgggaagaagcgaagaaagagcttggtcaagatacaattacggttgaattactaaacgatgataacggtagccgtaaaaaagtaggcgactttattaaggaagaactagagaaaaacttgcctggtattaaagtgaatttgaaacagcaaccatacaagcagaagctagatttagaaaagaaattccaatatgaattctcattatctgcatggagccctgattatccggatccaatgacttatattgatatgtttgttactggaagctcatttaatgaaatggattattctaatccgaagtatgatgatttagtagcgaaatcaaaaggagagctattaaaagatgataaagcacgctggaatgcacttgcggaagctgaaaaaatcttaattggtcaagacgcagcaatttctcctacgtaccaacaaagtacagcttatttagagaagccatttgtaaaaggcattgctaaccatacgtttggcggggacttcagttataaatgggcatatattacaaaaaaatagtataataaaagatgagtgaattttcgctcatcttttatttgtataaggaggaattatagttgttaagaggaatcaatcatatttgtttttcggtatctaatttagaaaactctattatgttttatgaaaaagtattagaaggagaattattagttaaaggaagaaaattagcttattttaacatatgtggagtatggatagcgcttaatgaagagacgcatattccgagaaatgagattcatcaatcttatacgcacattgcattttctgttgaacaagaagactttaaatgtctaatacagcgattagaagaaaatgatgttcatattttacaaggaagagaacgtgatgtaagagattgcgaatctatatactttgttgatcctgacggtcataaatttgagtttcactcagggacactgcaagaccgtttaaattattatagagatgagaaacctcatatgacattttattagggagggatagcatttgcatgcacttgtaattggtgggacaggaatgctaaagaaagtttctatgtggctttgtgagaaaggattttatgtttctattattggacgagatgaagtgaaattaaaaaatgttaagcgaatgagttctgcaccagaaaatattacatgcctttcgttagattatcataatgatgaagatgtaaagctagctattaaaagtacaattaagaaaaatggcccgatcacattagttgttgcatgggtacacacaagtgcaaagcatgcactatcaaatatttgtaaagaactagatttgtcgtctaaaacatagagtttatttcatattttaggtagtaaagcatcacgtatgcctgcacaaaaaatagggagtacgcgatgtatttatcatagaattattttaggttttattttagaagatacatatggaaggtggcttactcatcaagagatagctgatggaattataaaaaggattgaaagtaaacgagcggagtggattgtagggagagttgaaccgtgggaattacgaccaacatggtgagggggagtaagaaatgaaaacaactatatatgtaacaaggcatggtgaaacagagtgggatgtagcgaagcgaatgcagggacggaaaaattctgctttaactgaaaatggtatagttcaggcgaaacaattaggaaatcgaatgaaagatttaccaatccatgcgatctatagtagtccgagcgaaagaacacttcatacggcagagttaataaagggggaacgtgatatacccattatagcggatgagcatttctatgaaatcaacatgggtatatgggaaggacaaacaatcgcggatatagaaaagcaatttccagaagaagtacatctgttttggaatgagccacatctttttcagtcaacatcaggcgaaaattttgaggccgtttatgaaagagtaattgaagggatgcagcttcttttagagatgcataaaggacaaaatatattgattgtgtctcatgcggcagcagcaaaattacttgtagggcatttcgcgggaattgaaatagaaaatgtgtgggatgatccatttatgcatagtgccagtttgagcataatagaatttgaagagggtattggtaaagtgaaacaatttgcagatataagtcactttcaataaatgtaaaaaaggccgcaaaacggcctttttttgggtggtataaaaactagcagttacgttttttataccagaagtgatcgaatttcttatttttgcaagatgggaatttatgtctgccatctttgcaatcgttccatttctttccgtcatcacacgaatcgtcgcaagagccaccgtgtccattagggaagaattcgcattttttacagtaacatcgtttagtccagtaaaatttcttttcaaagcgtacacattttgtaacgaatgtacaatgctttctacgagtacgttttgtaactaaaacgcattcttttctacgcgttactttcgtaacgaacgtccatttttgcacgcgaacacgagtacattttgtaacaaatgtccactttttaacgtgagtacattttgtaacgaacgtacaatgtttcacgcgagtacatcttgttcttgggcatttacaatcttcgttacactctatttttgtagtgcaatcatcatcgcattcaaaagtacttggatcttggtgtaagaaatcctccatcccagcacttttgatttcttcgacagcttttctaatatcacgtttcatagaaatcctccttatcatgtattaaagtgaaaaggtattctttttccttaacatgatatgtatgtaggcatctttctgaacaggacaagagtgtaattttatataaatagatgattgcggatgtatggacaagacaaggcgcatacattgaatgaagagaactgagaagggatgagaaaacatgctgccttcatatgatttttttgttcatccaatgtacttagtggaattgaaaaaggacatttggtcagatagtccagtgccagcaaaattaacttatggaaaaaagaagtatgatattgatatcgtataccgaggagctcatattcgggaatttgagaaaaagtcttatcatgttatgttttataagcctaaaaaatttcaaggtgcgaaagagtttcatttgaattcggagtttatggatccgtctctcataagaaataaattatctttagatttttttcatgatattggtgtactttcgccaaaatcacaacatgtatttataaaaattaatggtcaaattcaaggtgtgtacttacagttagaatcggttgatgaaaattttttaaaaaatagaggattaccgagtggttctatttattatgcgatagatgatgatgcgaatttttcattaatgagtgaacgagataaagatgttaagacagagctctttgcgggttatgaatttaaatattcgaatgaaaatagtgaagaacaactgagtgaatttgtatttcaagcgaatactttgacgagggaagcctatgaaaaagaaattgggaagtttctacatgtagataaatatttacgatggttagcaggagttatttttacgcaaaactttgatggttttgttcataactatgcactatatcataacgatgaaacaaatttatttgaagttataccgtgggattatgatgcgacttgggggcgagatgtacaagggagaccgcttaatcatgaatatattcgcattcaagggtataatacgttgagtgcaagattgctagacatacctgtatttagaaagcagtatcgaagtattttagaagaaatattagaagatcaatttacagtttcgtttatgaggccgaaagtagaagggttgtgtgaattgattcgtccatatttactacaagatccatacatgaaagaaaaattagaaacatttgatcaagaggctgatatgatttatgaatatataaataagagaagaaagtatatacaagaccacttacatgaattggattaattttgaaagagattgaaacgttatcaatctctttttttttgtataataaagatgtatcaatgaaaatgaagtaatatatttgatagagaatggggatgcggatatatgacgattaaatggattgattgggtaaaacaaatacaatctatagctcaagcgggtttaacgtattctaaggatgtgtatgatattgagcgtttccagcaattacgagatatttctatttcaatgatgtcacattacacgaaaacagattgggaagtcgtagagaaattatttgcaagtgagacaggctatcaaacacctaaagttgatataagagctgttgtttttcaaaatgaaaagttattatttgtgaaagaaaaaagcgatgggaaatgggcattgccaggtggatgggctgatgtcggttatacgccaaccgaagttgcagcaaaagaagttttcgaagagactggttatgaggtagatcattttaagttactagctatatttgataaagaaaaacatcaaccatctccatcggcgacgcatgtatataagattttcattggatgtgagattattggtggagaaaagaaaactagcattgaaacagaagaggtggagttttttggtgaaaatgaattgcctaatttatcaattgctagaaatacagaagaccaaattaaagagatgtttgcctacatgaaagacccgcagaaagagaaattaatagattaatcctgcttgaattgtacatattgttaaaatgaagatattggcagattgcagcctttatgtaataatgggatggtatgtgaagaaaaaaggagataaaaaagaacatgttagcaaacataatagatcagttattgcaattttttgcaagcttaggttactttggagtagctcttgctttaatgattgaagtaatcccgagtgaaattgtactttcgtatgctggctttttagtagcgaatggtaaaattagttttgtgggtgcagttatcgccggaacgattggtggtactttagcgcaaatctttttatactggcttggatactacggagggcgtccggttgtagagaaatatgggaaatatctacttattaataaacatcatttagacatagcggaaggttggtttaagcgttatggagcaggcgtaatattttctgcgcgctttatcccagtagtacgtcatgcgatctctattccagcaggactagctaagatgccattaaaactatttacactttatacggttgtagcgatcattccatggtcaattctatttatatacttaggtgaaaaacttggtgggaattggcgacaaattaaagagtatgcatctgattacacacattacataattataggagctgttctttttattgctctatactttggtttaaagtatttcaaaaagaaaaaagcagcgcgttaaagtcaatgatttttcattggcttttttatttgtttcggttctaaagaaaaggagttgtccataatgtgtaataataaagcgtagcggaggaatgtgatgaaagggtcaccgtttatacgtggaacgatatttttaacgatggcaacgatgatatcaaaaatgttagggtttatatatgttataccatttacagcgatggtcggtacgagtggttacgttctatacacatatgcatatcgtccttataccatcatgctcagcatagcaacaatgggattaccgctagctgtttcaaagatggtatcaaaatatgatcaactgaatgattatcatacggttaagagagtgttgaaaagtggaatcgtgtttatgtttataatgggagtcatttcgtgttttacgttatatatgctagctccgcatttagctaaacttgtcatcgatgggaatgatcaaacggggaatagtgtaggagcggttactactaatattcgaattgtaagttttgcgttaatacttgtgccagtaatgagtttattaaggggcttctttcaaggattccaatcgatggggccttctgcattaagtgtagttgtagagcaattttttcgtgttttaaccattttaataggaagctttgtcgttttatatgttttaaaagcttctgtttcactagcagttggtatttcaacgttcggtgcctttatgggagctgtaggtggattaactgttttaagtgcgtattatatgagaaggagaaggcacttaaagaaaaaagaaatggcaagtataccacaaacaacgaaatcttttttctcactttataaggagctctttacatattctattccttttgttgtagtaggcttagcaattccgttgtatcagacgattgatacatttacaattaataaactacttatacagatagggtatatgcaaggcgaagcggaaaaaattaatgcgataattggccttgttcaaatggttgtgcttatcccggtatccgttgcgacagcttttagtatgtctctcgtaccagagatgacgaaagcttatacagcaggaaatacgaagctattgtacaaacattttacgagaacaaatgtattagtagtagcgattacggtaccggcggcaattggaatgatggtgttagccaagcctgtatatacccttttatttggtgctggaaatgatccagagatggggagaatcattttacagtattatgctcctgcttgcatactattttctctttttacagtaacggctgctatgctacaaggaatcaatcaacagcagaagacggtgctaggactagtgattggaattattgtgaagatagttttaaatattgtattgcttccgtatttcgattatgtaagttttatcatttcaacatacgcgggctatacgatttcagtcgggtttaacttgtggatgctttctaaatatgttataaaggcaacataagcttttaaggcagagagcactctgtctttttctatgtttatcccgctctaacgggcagtaagatcctcatctcaaaattcagcgaaagaaaagaagtttggttgggggcgggcagtccgtaaaagcccgattggtgagggttgaaaatcagtgggggggatgaagctcccactgattaaagtttcactttataatatttttcttataaaaacgttttcaaaataatttttctattgaaatttaaacgtatgtttcatatgctgagaatggcggtttaaaaactgtgatttaagagaggtagattcctacatgtaaaaagaatcggggtgatagtatgttaaatatatatttaacagaccgaaacggaaaactacaagagattgaggaaatgcaaaaggggtgctggattaatgtacttcatccaacagaagaagaaattcaatatctagtacaaactttaaatgtagacttagatttcattaaagaccctttggatgatgaagaacgctctcgtattgaaaaggaagacaataatactttaattatcgtggatattccgacagttagacatgacgaagaaggaaattcgatttatgacacgattccaataggtatgattgtgatgccggattgttttgttacaatctgcttagaagagaatccaatttttgaacgttttattaatcaacgtattaaagaattttatacgtttaagaagacgcgctttgcacttcagctcttatatacgatttctacttattatttaagatacttaaagcaaataaatcgaaaaacaattgatttagagcatcaattaaatcagtcaatgaaaaataaagagattttcacattattaggccttgagaaaagcttagtatactttacaacgtcattaaaggctaataaaattgtaattcaaaagttaatgcgtaatagtacatttttaaaaatgtatgaagacgatcaagatttattagaagatgtattaattgaaaataaacaggctattgaaatggcggaaatatatagtcatattttaagtggaatgatgaatacttttagctccgttatatcaaataatttaaatagtgttatgaaactgttaacgtcaattacgatcattttatctttaccgacgatggtttctagtttctttggaatgaacgtaaaggttccgtttgaaggagaagcccacggttttgtaattgtactcatcatatgtgtaacactatctttcacgttagcttttgttttttggaagaaacgttacttttaacgataagaaagctgctctagcatagttatataactacgctagagcagcttttttgctatgaaatctcaaattttgaatagaatataacttgtacaatgtaatgtatataaagggtatgtatgtcatataaaccttgtccaattaatgaaatggggttaaaattacatattgttaatgaaaagttggaggaaatacatcatggaattgtttcaattaccgaaagcattcctgcaaatgaatacaatttttatttccatattaatcgaagcacttccgtttgtgctcattggtgtatttatttcaggattcattcaaatgtttgtgacagaagatatggtggcaaaatggatgccgaagaaccgatttctgtctgttttattagctacttttttaggcatgttgtttccaggttgtgaatgtggaattgttccgattgtaagacgattaattggaaaaggcgttccaccatacgcagggattgcatttatgttaactggacctattattaatccagttgtattatttgctacttatgttgcctttgggagtagtatgcacatggtatggtatcgttctattgtagcgattatcgtagccattatcgttggaattatattatcctttatgtttaaagaacatcaattaagagatgatcacttcccagaagtgaataataagcgtccactgcgtaaaaaaatgtgggatgtatgtacacacgctgttgaggaattcttctcaatgggaaaatatttagtactaggtgcgttaattgcagcagcggtacaaacgtttgtacaaacttcaacacttcttgctattggacaaggcccattttcttcatcagctgttatgatgggacttgcttatatattatcactttgttcagaggcagatgcatttatcgcttcttcgttccaaagtacgttttcaacagcttcacttgtcgcgttcctcgtttacggaccgatggtggatattaaaaatatgtttatgatgcttgcgacatttaaaacgaaatttgtaattgttgttatagttacagttactcttgttgtttatgcaagctcactactcatttatgcgatggggtggtaggttatgtttcgagcatatatattattaggttttacaatattaattgcgcaactgcatatttccggtaacattacgaagtatatcaatatgaagtatgcctatttatcaacaacagcagcaattattttaggtttcttaacgattatacaaattatcgtcgttttccaaaaagagcaccaaaaggaaaaagagaaaaatgattgcagttgcgatcatagccattgcgggcatgatcattcaaaagatgagaatacatggtggaaaaaagcattttcgtactcattgttttgttttccaattatctcagggttatttttcccaattgcgacgctagattcggatattgttaaagcgaagggctttcactttcctgttgcacaagcagaaagtaaggatccatttatgacaagacaattcctaagacctgatacgagcatttattacgggaaagaaggataccgcggtgtaatggaaaaagggaagaaagagtttgttacgaaagacaatattaatttgaaagatgaagacttcctaaagggtatggaaacaatttataattatcctggcgagtttactgggaaaaaattatcttttaaagggtttgtttttagagatgattcttctaaaaaagaacaatacttcttattccgtttcggtattatacattgcgtagcagattctggtgtgtatggtatgttagtgaaaaaaccagaaggcgtagagtggaataatgatgactggattcaagtagaaggagagataactactgagttttatcagccgtttcatgcgaatattcctgtattagaagtaacaaaatggaataaagttgaacagccgaaagaacaatatgtatttagaggagccgattgataaaatcggttcttttttgtggactaaaagttctgaatgttgttaatattaaacgtgtagttcatttagtatagtgattattgaaatattagggatagatcattaaaggggtgataacaatgacagaagtaaaggggaaaacagccaatgagtcaagggtgttcaaaacgagccgagtcttcccaacggatttaaatgatcataacacgctatttggtgggaagatattagcggagatggatatggttgcttctatttcagcatccagacattcaagaaaggaatgtgtcacagcatctatggactgggtcgatttcttacatcctgttcgttcttcagattgtgttagttatgaatctttcgtaatttggacgggaagaacttcgatggaagtgtttgtgaaggtagtggctgaagatttaatttcaggtgagaagcgtatagcggcaacgtcattcgttacttttgtggcacttagtaaggaaaataatccagttccagtaccgcgtgttatccctgaaaccgaagaagagaaagaattacatcgtattgctgtgttacgtgcagaacagcgtcatatacgtaaggcagagagtaagaaagtagccacattgttaaccttttgagatgaatatttagccatttaagttactatagcagtcggaaatggttttaaaatgaaaagcggacacctaaaataggtgtccgcttttatagttttttcatccacatatcatatgacagtagctacttagcagaagcaagcagcaccgacgatgattaagaggataaataatacgactaatagcgcaaatccattaccatgtgcgaagcccattgttatttcctccttttattttaagatacaacatacaatatgcaaatgagctattgtttgatatggacatatatcatgcaatgacatattttcttgaatgataatgtaataaaaaagggaagatatagaaataacagtaagtggagaaaggaatttatccatgaagcactttttcgctataatcctttgtttaataggtgtattcatttggatgaacatcgatgtggaaatggggaaggaaatggctagtgaatatgaattaggacaagttcgattaggtgaatttcaactatatacgaacggtgaagagttatatagaaaattatttgacgatataaacgatgcagaaaagtatatatatatccatttttatattgtaggaaaagatgaaataagccaagagtttttacagttattagagaaaaaagcatctagcggagtagaagtgaaattgtcagtcgatcgggtaggcggatataagctgaagaaaaaggtaattagccgattaaaagaaaacggtgtgaagtttacatttagtaaaaaaccgaaactgaaaaatatgttctattctttgcatcaacgaaatcatagacgtattgttacgatagatggaaaggtatcatacgtcggtggctttaatatcggaaaggagtaccttggacaaaatccaaagtttgggccatggcgtgattatcacgtgcgcatccatggtgagggtgcagcggatatggaaagaaagttcgccgaagattggaaagaagatacaggagaaaaaatgcctatacatgaaagtatacctacattagggaatgtgaaatatcaatatttattttcaaatggaaaaggcttatgggaaaaatatggagcactattaaagcaggctaaaaagtctttaattatcgctacaccatattttgtaccaagtaaagaaatggtgaaagagttaaaagctgcattaaatcgtggtgttaatgtaaaaattctcgtgccatttaaaagtgatgccatattgttaaaacaagctgcctatccatatttgaaagatatgttacatgctggagcggagatttatcaatatcgaaatggattttttcatgggaaagtaacaattattgatggagaaattgttgatattgggacagcgaattttgataatagaagtttttatttaaattgtgagtctaactgtatcatatatgataaaaccgttgttgatgaagtatggagtcgattacaggtagactttcataaatcaaaacgattttctgaagaagattttgagaaaattagtagatgggattggtttttagcaagaatagcgaatgttttagcatcatatttatagtatatggacgaaagagaagggaggcgctttaatggactgtatgaaagaattaatgagatatagttatatactaatatacaaggttggagagtatgctggaaaggtcagagacgaagaattaaaaaatctattacagcaccatttaccatatatgttacaagcatataatgaacaagtaaattttcaagaaggagagaatgtgcaacatataacctgtgaaacaacggagtttgatttgcatgaaatggaaaaggaaacagttagtaaatatacaggggatattcatattgcaaccagttatattgcgcacttgaaacgattagctttaaagtttgctcaagttgcagtggaagttgctaatccagagtttcgctcatttttggaaaattgtttcctgaaaatgaaccgttacgcttatagtgtgtggcaatatgttatgaagaaggaatataagattacacatctatatgaaaatgaaaagtttgcatgagaaactaaggcgaaatggtatgcgccttagtttttttacgtccattgagagaaaaaactagttttattgtgtatcgattggaaatgaaatatataaattaaaattaggatttgttatcagaagatttacaaaaatttaccgtatatttactatttttcaatctctcctttaaaaatagagagtaatatgaggttgtacatattctatcacaaggaggaaacgcaaatgaacaaatgggttaaatcattaactgctatggcacttgcaagttctttattaatggtaggttgtagtaaaggtgaggacaagaagaaagaagacgacacaacaacacaacaagaggataaaaaggataaagaaacaagcggaaccgagaagtctactgattctaaagaaaagaaataaagtaataataaagcttcctctcatatatgaggaagcttttttgttgtaaatttattgagattattgaaaaatagaaagagaatgaaagagggggaaaacaaatgaaagtatgtatattgggagcaacaggacgagtaggttcaaacataattaatttagcattaaaggattcagctgaagtgactgcattagcgcgtgatttaaatagaatagaaatacaacatgaaaggctacgagtgatagaaggtaatgtattgaacgaaaatgatataaagaaagtgatagaaggaagcgatatagtaattagtgcacttggaacggatcaaaatggaacattagggaagagtatgccacaaatcattaagcaaatggaagaagaaggggttcgtagaatcataacaataggaacagctggtattttacaagcaagaacaaatctaaatttatatcgttttcaatcaacggaatccaaaaggaaaacgacaacggcagcggaagatcatttggctgcatataaagtactaagtaatagtaataatttatgttggacagttgtttgtccgacacatttaatagatggtgaggcgacagaggtatatcgaactgaaaaagatatattgccagagggtggatcaaaaattacagtgggtgatacagcacactttgcatgggatctatgtaagaaaaacatatatgaaaatagtcgagtaggtattgcatattaaaaaaccatcccgaagtcgggatggttaaaagatgatataacacaagaagatgataatcataatgatttggagaattgctttcgctactgtactgcttaaaaaaccaactacagtagcgactccaactagaaaggcatcttttggcgcttttttatgcactagttctgttataaatactgataagaacggtatgataataagtccgaatggtgggaagaagaacgatccgacaatgatagaaatcattccgacacgttcgccccatttagaactaccgtatttttttaagaaatatccatttgcaataaaatcagcaacgaaaatgaaaagagtaaaaatgacttgaataatccaaaaagaagttgttaattcgcctccatttataccgaaatggtaaatcaaatatccagcccagacagctagtatgccagggataattggataaataaaggcgagaaatgaaacaacgaaacaggcaatgatacaaattgttaataaaacagtcactttatagctcctttttaatatctagtttatgtacagcaacttttttgacttgatggccatcaagttctaatactttaaattgaaaaccagcatattcaatggaatagccagcttcaatatttaagtcaactgcttgagaaagaagccatcctccgattgtatctaaatcactatcatcaatatgtaggccaaacatatcatttacttcagaaataagcacctttccatctaaaacagtaagcttaggtgtacgcttttcaatcataggtgattcatccgcatcgaattcatcttgaatttctccaatgatttcttcaagaatatcttccatcgttaaaagtccggcagtaccaccatattcatccataacgattgccatctgaacgcgatttttttgaagatggactaacgttttacgaattggaactgtttcaaatacagttagaacaggatgtatataagattcaagtggcttataaatacctttcgtttgatcatggaatacttctttcgtattgatcatcccaatgatatcatctttatctttttcgataattggatagcgtgtatatttttcagtagcgacgatatccatattttcttctaacgtattttcagtagataagcaaatcatttcggtacgaggaaccataatttcttttgcaactcgatcatcaaattcaaaaatgttatttacatatttatattcggtttggtttatttcaccgcttttaaaactttcacctaaaatgagtcgcaattcctcttcagaatgagcaagttcactttctttcgcaggttctaatccgagtaattttgtgaaaaatatagctgtactattgagtagccaaatgaatgggtacataattttatcaaataaaataagcggtcttgcaaatttgagtgtgatcgcttctgctttttgaattgcgaaagactttggaactaattcacctaatacaacgtggaaaaatgtaataacactaaaagcaataacaaaagataaagtgttagccattgttccagtaatattaattttttcaaagagcggtcgtagtatatgttccacagtcggttcaccaagccaaccaagccctaaagaagtgattgtaattccgagctgacaagctgataaataaacatctaaattagataggacgcttcttgcagctaaagcttgtttattaccttcatttgcaagttggtcaattcgactttttcgtacttttacaacagcgaattctgatgcaacgaaaaagccagaaataagaataagtacaaagatgagaaaaatatttaatatgtccaagcgtgttctccattccaaggtttggaataaagatgtcacctcctgcaattatgttatacttttataataaatccaaatgaaaagaatagtcaaaggaaaagggtaaatattggtatgtttctgtaatagtttttgaatttgctgttattttgtccgctatacaaaaggaataaccccctacttttagattatagagggttattttaaattaaggttttggaacacttctcgtcaaagtgtatgactgttgtttggagtagtttgtggtccatagtgtttgaaggaaagaaagtatgctatatgggatatagagtagtaataagccgattgtaacaattatgggtgaatttccgccaaattgaacgataaattgtaacagtccatttgcatgaaaaacgcattccataaaaacgaatgaaagaataatggaacctaaaattgatttatgattcgaagtaagcgccaaaaacaatgtatccacaagaaaagaatcatgttttatttcatattcatttgtgttttttaagaaaggaatccatttttttactgcttgcataacgataatcatggaagtactacatacgatgataaatgatgagtagtaaggaaggtttataaattgtgcgatgtatagaagtagtaataagactgaacattgtaatactacagtgcaaaaagagtaaggaatccatttcaatacagtagtaaactttttaaacgaattaggtactttgaaaaataaatggccgatacccaaacttatgaaaaatccgatcgcaagggtaaaagtaaaacgaacaatcgatataaaatatatttcccatatgtaagggaataatggtgttgaatgattagaagtatgtatcatttggtttgctgagaaaaagatagattcatgcatccaatcaacctttggaattgatatagaagaaagctgtgcgaagttttgaaaaatgctaataaattcattttgataagaataattgtgtgtaataaaaagagctggaataggacttatggcaaaaataacaataataccaattataaatttacatatatgtgagcgtaataaggacatataaccacctactcttagaatattcagaaaattcttattcttattttagctttttttgaaagaagttacaatatatttttcatttagtaattcagagagaagatttgatagcaaaaatatacaagtgaaggattcatgaataaattatgacaagaaaatgaataattttcagaaaaataaaataaattatttatttttttctgaaaatataatatagttatggcacagaaagtattttaacataaggaggctttttatgaggattaaagggaattacgtgccgaaaagggaagttttactgtgctcaagttcgattacgataggggaagcgttagagcatttaaataaaacggggtatcgttgtgtaccagttttagatgaaaaaaaagagaaatttttagggaatatatataaagtagatattttagaatataaaggatcacttgatgagagtgtaatacaattattaaacgataaagaaggatttgtgagagaagattcatctttctttaaagtattttttacaataaaaaaattgccttatttatcagtagttgatgaaaaaggggttttccttggaattttaacgcataaaaaagtttttgagttattagaggatgcatggggcgttcactctagtaaatactctgtcatgattggaacgcaagactataatggagcaatccaaaagttatcgacagttttaaagaaatacactggtattcaaagtttgatgacttttgataatgatgccttattagttcgtagaattatgtttacattaggagaagagtttaacgacggtgaattagagacattattggaagatttagaagatcacggatttagagttgtgtatgtggaagagatgaaaaatccacgtgaagttgaaacgatagagtaacatacaaaagccatctaattatattgaagtgacccccgaaagttagacaggtcgtttcattaggcagcctctagggtatgagcccggtattgtactgggctaattttccttttattatacaagaaataccctatagaatagacttttttcaagtgtctattctatagggtacattttaaattgaaagagtcctttttttatttactagatgaagtttgtttcaatacaaattgctcgattgcatgagcaacaccatgttcattgtttgttagtgttacaacatcacatagcttttttacatcttcttcagcgttgcccattgcaacagataaacccgctacttctaacatcggtacatcattaaaattatcaccaatagcaactgtatcttcaatagggatattaaaatgagctgccatctgctgtatcccgtttcctttatgtccattcttatccataatttctaagttagtaggagccgatgctgtaaccataatatcagcatcctcttgtaatatacttaatagctgtgcgcgatgcgctgcattaaacgttaaaatgaagaatttagatatttctagttcttggttatttacaacatcttctatttttttgaaatcagtaattaggttcgatttcttttgcttttctgtaattcgttcaagttcctctaatgtaacatcaagcgcatgcttattttcttcgaatgcttgcatcacttgatcttgccatgtatatggagaataaactcctttatttgtatatagcttatatgggaaaccttcagattctagtaattttgcaagtttgtacactttgtcgttttgtatacaacgcgagttaattacttttccatccacataaacaatagccccattgcttgctccgactggaagagataatttatattcttccaatagctttaaagcatcctctttcgcacgaccagaacagatcattacaatatgaccggcttcttgtgcagtttggattgcttgtaggttttctttggagatttcaagattagatgatagtagtgtaccatccatatctaatgcgattaatttcaaaatgaccacctctttgtttttattatacatagttatatagaggaaacatataaacttatcttggaaagacggtattttatctcatattaaaagtaagtaaagattagataggtttagtggcactaaataaacaatttgtaacaaaaatagagaggaatatgactacatttcactttatgactgtaatgttacacgaatgttacaaacgtgaacttagtgaaaaacgcattaaataaaggtttttgagggttatcataaaaaaacgtaaaaaaagtgtaataaattttacgtaattatattgcaacgtaataatagttatgttacattaatgttacaaacgttacgttatcaaatttaatgtaacgttaacataaaaactatgaaataaacatttcttagaaattacatatagataacttataaaaagggaggataaatgatatgaaagagcaagtattacaagtaacaaaaggtgacttcgtaggatcagcaagtggagcagtagtattaacagcgttaatcgtatttctatcaagcgtattagtataatagaagctttgtaacaaaagaaaaagaagggagaatgaaagatatgaaagagcaggtattacaagtaacaaaaggtgacttcgtaggatcagcaagtggagcggtagtattaacagcattaatcgtatttttatcaagcgtattagtataatagaagttttgtaataaaagaaaaagagaggagaatgaaagatatgaaagagcaagtattacaagtaacaaaaggtgacttcgtaggatcagcaagtggagcagtagtattaacagcgttaatcgtatttctatcaagcgtattagtataatagaagttttgtaataaaagaaaaagagaggagaatgaaagatatgaaagagcaagtattacaagtaacaaaaggtgacttcgtaggatcagcaagtggagcagtagtattaacagcgttaatcgtatttctatcaagtgtattagtataatagaagttttaaattaaacaaaaaaggaaggagaatgagggatatgaacagtgaacaagtgtttcaagtaacaaaaacagatttattaggatccttaggtggagcggtaatattaacatcatttattctattccttgcaaatgtattagtatgagatatataaatacaatcattcaaaaaaaataaagactctaacgtattagtaagtagttaatatgttggagtcttttttatattcttcttatataccctcaagtattaaagttacctcattatccagcattcatggctaattaaacgctgcggttgaaacttgattcaacgaataatcaaaaagccactgaataaaatcccgctttatttcaaagagaaaaaagtcgaattttatatgtaagaaaaaaagaggaatttgacagaaaagatagaaaattttaaaggtcagaatttgttagcttgctaactaatttctattaattaatgttggaagcgttttcggttggttttaagtatggaccatttaatctatttacagggggatgaagatattatgaaacaaaaatctatggatacgctagctgcacaaatggaggacttttttccagtacgtgatgtagatcatttggaattttacgtagggaatgcaaagcaatcgagttattatcttgcgagagcgttcggattcaaaattgtagcttactctggattagaaactggaaaccgtgaaaaggtatcttatgttcttgtgcaaaaaaatatgcgtttcgttgtgtctggagctttaagtagtgaaaatcgtattgcagagtttgtaaagactcatggtgatggcgtgaaggatgtggcactacttgttgatgatgttgataaagcatactcagaagcagtgaaacgtggtgccgtcgcaattgctccaccgcaggaattaacagatgaggacggtacattgaaaaaagcagttattggtacgtatggtgatacaattcatacgcttgtagagcgtaaaaattataaaggggcatttatgccaggattccaaaaggtagaatttaatattccatttgaggagtctggtttaattgctgttgatcatgtagttggtaatgttgaaaaaatggaagagtgggttagttattacgagaatgttatgggctttaaacaaatgattcattttgatgatgacgatattagtacagagtattcggcgttaatgtcaaaagttatgacgaatggaagtcgtattaagtttcctattaacgaaccagcagacggaaagagaaagtcacaaattcaagagtatctagaattctataatggagctggtgtacaacatcttgctttattaacaagtgatattgttaaaacagttgaagcgcttcgtgcaaatggggtggagtttttagatacacctgatacttattacgatgagctaactgcacgagttggaaaaatcgatgaagaaattgataagttaaaagaattaaagatcttagtagatcgtgatgatgaaggttacttactacaaatctttacgaaaccaattgtagatcgtccgactttatttattgaaatcattcaacgtaaaggttctcgtggatttggtgaaggaaactttaaagcgttattcgaatcaattgaaagagaacaagagcgtcgcggaaacttataagatttgtatccaccagcaaaagtccctttgctggtggaaatttcatttttataaggaggaatcaggatgaaatttgttacatttcgtcttccttcaaaagaactacgggctggatggcttgaaggtgacaaagtaatagatatgaatcttgctagtgaagggaaaatcccttcttctatgatagattttttagagaaagcggatgagtatgtagaagtagtgcggaatattaagaatccaaataagggtatatatgctttagaagaagtacaattgacagctgctcttcctaatccgagtagtattcgagatttttacgcatttgaacaacatgtaaaaacagctcgtggacgaagaggattagatgttgtgcctgaatggtatgatattccggttttttattttactaatcatcgtgctgtaattggttccggtgattttgtaattggtccgaaaaagtctaaaaagcttgattatgagttggagattgcttgcgtaataggaaaagaagggcgaaatatttctcgtgagcaagcagaggaatatatttttggttattgtattatgaacgattggagtgcgagagacttacaagcaacagaaatgaaagtaggtctcggtccagcgaaaggaaaagactttgcaacttctttaggagcacatctcgttacgaaagaggaattagacgtttatcgtaatggtgatcgatataatttagaaatgactgctcatgtaaatggaaaactattatcaaaaggaaacttccaagatatttactatacatttgctgaaatgattgaacgtgcttcagaggacgttacgttatatccaggagatgtgattggttctgggacagtaggaacaggatgtattttagaactgggtacagaagagtggctacaagatggagatgttgtagaactgtcgattactggtttaggtacactacgtaatacgatcaaaaaagaaaaggaagcgggtgatgggcatgttttatcgtcacatgggagaactacctcataaacgacatgtacaatttcgtaaaaaagatgggtcgctttatcgtgaacaggtaatgggaacaaaaggtttttctggtacgcagtctattttgtatcatcattatatgccaacagaagtaggtcattctgcattatcgcattcttgtcagttgcagtatgaagaggatgttgctctttctcatcgccactttcgaacgaaagaaagtaaaaaaagtggtgatgcaataagtggacgtaatttcatacttggaaatgaagatttgttaattggagtagtgagtccaacagaaaaaatggattatttctatcgtaatggtgatggcgatgaaatgttatttgttcattatggaacagggaaaattgaaacgatgtttggaacgattcactatagaaaaggcgactatgtaacgattccaattggaacgatttatcgtgttattccagatgaaggagagactaagtttcttgttgtagaggcaaatagccaaattacaacgccgcgtcgttatcgaaatgaatacggacaattgttagagcatagtccgttttgtgaaagagatcttcgtggtccagaaaaattagagacatatgatgaaaaaggcgagtttgtcgtaatgacaaaatcaagaggctatatgcataaacatgttttaggacaccacccgttagatgttgttggatgggatggctatttatatccgtgggtatttaatgtagaggattttgaaccaattacagggcgcattcatcagccaccgccagtacatcaaacatttgaagggcataattttgttatttgctctttcgtaccacgtttatacgattatcatccagagtcaattccagcaccatattatcatagtaatgttaatagtgatgaagttctttactatgtagaaggaaactttatgagtcgcaaaggtgtggaagaaggttctattacacttcatccgagcgggattccccatggaccgcatccggggaaaacagaggcaagtatagggaagaaagagacgcttgaattagctgttatgatagacacattccgtccgcttcgtattgtaaaacaagcacatgaaacagaagatgaaaagtatatgtatagctggattgaacaaggttcatatactgtgaaataagtaaaaaaggcatgctctcaataaggggggcatgcctttttcacggaatcgacatgtataataataccaaaaaaataatggaaagatatatagaaagaataataaggatcgtgcatattcagaagaatttctacttgtttcgacaaaagtattgactaggaaaagcgtaatgagtaaaataaaaaagcgaattaaaaattttcagaaaatttaaaacttggaggagtgaaagatgaagcaaatttttcaaaagaagccaattgcaaagttaatgcatgaaagtaagcaaaaaacgttagcaagaacattgggtgcgctagatttaactatgcttggaatcggagcaattgttggaactggtatttttgttctaacgggtgttgtggcagcgaaacattctgggccagctattatattatcatttgcgattgccgcgttagcttgtgcctttgctgcattttgttatgctgaatttgcttcttcagttcctgtctcgggcagtgtgtatacgtatacatacgcgacgatgggggaagtgttcgcatttttaattggctgggacttaatgcttgaatatttacttgctacatctgctgtagcaaacggttggtctgcatattttcaatctttattaaaggggtttggaattcacattccgactattctctcctcggctcctggtacaggaaagggtggaataattgatttacctgcagttctaattattttagtgatgacagttcttttatctaggggtgttcgtgaaagtgcacgagtaaataacattatggtatttattaaaatagcagttgttcttatttttatctttgctggttttaattatgtgaaacctgaaaactggacgccctttatgccatttggtttagatggtgtaatggctggagcggctacagtattcttcgcatttataggatttgatgcagtttcaacagcggcagaagaagtgaaacgtccgcaacgtgatttaccaattggtattattgcatcgttattaatttgtacagttctttatatcgttgtttcgcttattttgacagggattgttccatacggccagctaaatatatcagatccagttgcttttgcacttcaatttattggacaagatggtttagcgggggtaatttcagtaggagcaattacaggaattacaacagtaatgctagttatgatgtatgggcaagttcgtgtttcttatgcgatgagccgagatggtttactgccgaagcgtcttgctaaagttcatccgaaatttaaaacgccatttttaaatacatggacaacggggattattgcggcactgatttcaggattaatagatttaaatgttttagcacatcttgtaaatatggggacattgtcagcatttgcacttgtagctgttgcggtaatcgtaatgagaagaactcatccagacttaccaagggcatttaaggctccgcttgtaccatttttaccagcattaacagtgattttctgtttatacttaatgcttcagttatcagggacagcgtggattagttttgggatatggatggttattggtatagcggtttacttcttatatagccgaaaacatagtgctttaaataatagtaaaaaagaagaagatgttgcaaatttataagcgaaaaaatccattctaattctgttagaatggattttttatttgaaaatttacatttttctgaacttgttataagataattgttggctaactaaaggggtggaatgatgaaaaatacgtggcgtgagttaagggagatggaccgtaacgtatggattcgatttattggagagacgttaaatggaattgcaatgatgatgttaatgcctttttttgcattatatttaaaagataaggtagattcgttgttggaagttggggttattatggcgctttctccaattgctgcaagctttggatcacttataggagggagaattgctgacatatatggaagaaagcctattatgatattttctatggcaagtaatgcattattaatgctcggttttctatttatagaaggatttattccatatgcaattttatctatttttttagggttgagtaattctttatttcatccagctgcatcagctatggtcgcggatgtaacggcaccagaaaaaagaacagaggcatatggtttattacgaatgggacacaatataggtgctgcgattggtccgataatgggagcatcagtagttgtgttgtcaaagaaccttgtgtttattattgcctcttctacaatgctattttatgcgttacttgtattacttcttattcaagagacgatgccaaagagcatagataaggaagaacataaagaaaaggaatctggggcagtttggaaaattgtaatgcgagataaggcattaatgatttacttattagcaggtattatcatttcgatggggttttctcaaacggaaggcatgctgccactacattttgataatgaaatgaagcgtatttttggaacgaataatccatatccatatttaatggcgttaaacggactattagttgttttattccagtttcaaatttcaaaatgggctacggataaaccagttgggaagacgatgttatatggtgcatgtttattcgggattggattattttttatagggtggttaccgaagtggtttggagaatttaatacaaatgctacaattattttaataacactactgttcgtttatgctatatatacgttaggtgaaatgattatgtcgcctgtacagatgacatttgtagcaaatttggcccctgagcatttgagagggacttatatgggagctgcaagtttgcagtggattacaggaagcgcatttggcccacttttgggaggttttttattagatcggttacttggtcaccttctatttacaattttagctgtaggatgtgtagttgcaggtattgtatatgtttctttagatcgccttgttgagcaaaggcaaaaagacacactaaccaaacaatcttcttagtgaataggtgacatacacaaaaaaggggatttctacatattttaggtacataactagattagattgccattttattttgtgtacctatatagaaaatgaaatgaaaaaccaataagtgatgttatttaattatttatggaagttacattttatttcaaataggaactacctatttttataaaaagtgctaaaatagaaaaatgaaaacaattggttagggtgatttcattgacgaaaattaaattaggtttattatatggtggaaaatcagctgagcatcaagtttcgctacagacggctcttgctgctattaaagcgttaaatcaagataaattcgagattcatccaatttatattacagaacaaggtcaatgggtacgcggtgagcgtattgaaggcgaagtaacagatgttgaagctttaaaaatgagcggtgcagaaaatgcgatttctccgttatcattaagtacagaaattatcccatctgcagcttctgaggagaacgctattgacgttattttcccattactacatggaccaaacggtgaagatggaacggttcaaggactattagaattaatgaatatcccttatgtaggaaatggtgttctagcatcatctgctggtatggataaagttgttatgaaaaacatctttgcagaggctggtttaaaacaagcaaaatatgcatccttcattcgtagtgcatgggagaaaaatcgtgaggaagcttattctaaagtagaagataagttaggatatccttgcttcgtaaaaccagcgaaccttggttcaagtgttggtattaataagtgtaaaaatcgtgaagaacttgaggatgcatttgtagaggcattccaatttgatcgcaaaattattgtagaagaaaatattgtaggtcgtgaagtagaagttggggtactaggtaatgatgagccgaaatgttcagttgtaggtgaaatcgttccgaaaaaggacttctatgattataagtcgaaatatatcgatggtgatacggcgctaattattccagctgaaatgacagaagaagaatctaatgtaattaagcgtgatgcgattattgcattccaatcattagacggtgcaggtttaacgcgagctgatttcttcttaacgaaagatggagaagtgtatattaacgaagtaaacacaatgccaggatttacaccgttcagtatgttccctctattatggcaacatactgggttaccgtatccagaattaattgaagagctaattcgtttagcgattgaacgtcacgaagaaaaacaaaaaattaaatatacaatctaacaaaaaaggaggaagcactattcgtaggaatagtgcttcctctatgtaaggagcgtttctatatgataaagcgaatgttaaagcaagtggaacagatggtaaatggtactggattagcagagcaatatgagggaattactattcaaggcgtgtctattgatacaagaaaaattgaaaaaggaaacttgtatgttccgattcaaggggagcgcttcgatggacatgcttttgtagataaagctgttgaaaatggagctgtggctacattatggatgaaagatgtagcgaatccacctgagaatcttccggttatttttgtggaagacacgctatccgcattgcaaatgttagcgaaaaactatcgcgatcaattggatgttaaagttgtaggtgtaacgggtagtaatggtaaaacatctacgaaagatattgtaacaagtcttcttgcgactaaattcaaagtgcaaaaaacagaagggaacttcaataaccatatcggattacctcttaccattttaaacttagaagaaaatacagaagtagcagtattagagatgggtatgtcaagccgaggcgaaattgaattcttatctaagttagctcgtcctaatgcagctatcattacgaatattggtgaggcacatttaatggatttagggtctcgtgaggcaattgctgaagcgaaattagaaattgttacagggttacaagaaggtggcgtgttcgtatataacggagatgagcctttattaacgaatcgtgttcctgaaatgaatttagcagcagaaacggttacgtttggtgatgcaagagcaaacgattattatccaacgactgtaacattacaagcaactgggacacatttcaaaatgaatagagatgaaaatatttcattctacttacctgtgttaggaaaacataatgtgtataatacacttgcttcaatggcaattgcgaaacattttggtgtaacgtgggaagagatgaaagaaggtttagtaacacttcaaatgacgggcatgcgtatggaaattgtgaaaacaaatagtggtttaacaattatcaacgatgcttataatgcaagtccgacggctatggaagcagcattccatttaatgaatggtttagatggttttgctaaaaaaatcgttgtgctcggtgatatgttagaacttggagatcaagaagtacagttccattatgaggtaggaaaattaatcgatccagcaaaaatctcgcatgtattcacatacggtagattaggggctcaaattgctgaaggagcgaaaattaatttccctaatgaacgtgtaaaggcgtatgataataaagaagagttagtaaaagatttacaagcagtagtcgatgtgaaagatgttgtattaataaaagcatctcgcggtatgaaattagaagaagtaattacgatgttgaaataattggtgtatataaatagggatgatagttacgaaaatagaagaaacttataataagcgcttacagtaaatataaaaaaataaaagtgaagaaaaaaactctgaatatgaaaataaggtaacagttgggtttgctttttacacatacaaaacttataattgataaagtgtaataacgtttagaagtattttcgtgaagaatatacgcccgtttatatacgtgagcattcaggaaaagggcttttccgcaaattcggaaaacgcctttttttaaatgataagtataggatagaaaaggagaagtaacattgacaacatttcgagaattaggattaagtgattctttactgcaatctgttgaaagtatgggctttgaagaggctacaccaattcaagctgaaacaattccacatgcattgcaaggtaaagatattattgggcaagcgcaaacaggtacagggaaaacagcagcattcggattaccactattagataaagtggatacacataaagaatcggttcaaggtattgttatcgcgccaacgcgtgaattagcaattcaagttggagaagaattatacaaaattggtaagcataaacgtgttcgcattttaccaatttatggtggtcaagatattaaccgccaaattcgtgctctaaaaaaacacccacacattattgttggtacgccgggtcgtattttagatcatattaaccgtaaaacacttcgcctgcaaaacgtagagacagttgttcttgacgaagcggatgaaatgttaaacatgggcttcattgaagacattgaagcaattttaacagatgtgccagaaacacatcaaacattactattctcagcgacaatgccggatccaatccgccgtattgctgagcgtttcatgactgagcctcaacacattaaagtaaaagcaaaagaagtaacaatgccaaacattcagcagttctatttagaagtgcaagaaaagaaaaagtttgacgtgttaacacgcttattagatattcaatctccagagcttgcaatcgtattcggtcgtacaaagcgtcgtgttgatgaattatcagaagcattaaacttacgtggttatgctgcagaaggtattcacggtgatttaactcaggcgaaacgtatgtctgtattacgtaaatttaaagaaggttctattgaagttcttgttgcaacagacgttgctgcacgtggtcttgatatttcaggcgtaacgcacgtatataacttcgatattccacaagatccagaatcatacgttcaccgtatcggtcgtactggtcgtgcaggtaaaaaaggtattgcaatgctatttgtaacaccacgtgaatcaggacaattaaaaaatatcgagcgtacaacaaaacgtaaaatggaccgtatggatgcaccgacacttgacgaggcattagaaggtcaacaacgtttaatcgctgaaaagcttcaaagcacaattgaaaatgaaaacttagcatactacaagcgtattgcagaagaaatgttagaagaaaatgactctgtaacagtagtagctgctgctttaaaaatgatgactaaagagccggatacaactccgatcgctttaacatcagaaccacctgttgtttcaagaggcggcggttctaaaaaacgcggcggtaacggaggcggataccgtgatggtaaccgtaatcgtagtcgtgatgcacgcggcggtggcgatggacgtaatcgtgaccgtaaccgtgatggacgtaatcgtgacggaaaccgtgatcgcaatcgtgatggtggtagtcgtggtcgtagaggtgaaggccaaggtcgccctggttcttcaaatggacgcggcgaaagaaaacatcatagccgtccacaagcttaataaaaaaagagaatgccctttgcgggcattctctttttttatttctataattgtgcatactacataatagttatgatagaaaaggggctgttatatgcttgtaaggcttggttacgttgcgatgagtgtacatttgaagaatgcatctccatctcaaacgatgacgtatgcacagtttcagaaattaaatgatcgtgctgctgcaattcgtaaacttgaaagaattgctaattccaatttagaaaattgtttacgtttattaaagcataataaagggcatgacatatctttctttcggctcagttcaaagctcattcctttagcgaatcatgaggaattgctagagtggaactatattcgtcctttaaaagaaaatttaaaaaaactaggtgaatatgcagttcatatgaatatgagaattgatttccatccagatcattttgttgtactaaattcacctgaggagagtgtttttaaacaatctgtaaaaacattgcagatgcacaaaaaattattaaaaggcatggggattgaacataagcaacgatgtgtactgcatgtcggaggaggatataaagataaagaacttgcattagagcgctttatagagaagtggtctaatgtcccaaggggtattcaagaaatgattatattagaaaatgatgatacaacctttacgttagaggaaacattatatttaggagaaaaattagatattcccgtcgtatttgacttgcatcaccatatgatgaataatgagcaagaagattggtatgaagattgggcacgtgtcgttcatacgtgggaaacgtctttgttgccggttaaaatgcatatctctagccctagagagggaaaagatccaagagctcatgcagattatattaatgtagaggcatttttatcttttttaagaaggataaagggaagtgttccgcaaattgattgtatgattgaggcgaagatgaaggatgagtctttatttcaattaatgagagatttaagtgaacaagtagatgtagaaattatcgatggtgcaagcttttatattaaataagctttgcaccatcgttttttttggttaaaaaaggggttaaaatgccaccggttattaaacctgttaaatgactgatcggattggcagaagggttaaagaaagtaaatagtagtaatagaagaatcataattgagaaaatggcaatttcttttggttttgaagagcggtattgattgtacaataaaaataactgtgcacctaatagtccgaaaataccacctgatgcacctgcgtgaatatattcaagcggcataataatataagaagaaatatttccagaaattccagagagaaaaaatagaataaaaaaagaaaagtgtccgagttgcttttcgatagaagaaccaagagcaaacaaaaaaatactattagaaagaaaatgttgtaagtctacgtgtacgagaagagaagttatgacacgccaccattctcctttagcgatatattcattagaggctgccagtggtaagagaaaaaagtcgcctaatatcatcatgactaaatgaataagaagtaaggtaagaatagtcggttgtaaagaaatatgagtggatcttattagcatacggttactttcaccccttttgcatcagaaagattctctgttattcttatcaatatgaaagaagaaagttaaatagaagaaggggatttcgaaatgattatagggattggtatcgatattattgaattaaatcgtattgaaaaaatgctagatggaaagcttaaatttatggaacgtattttaacggaaaatgaacgtaatgttgctatggagctgaaaggaagtcgccttacagagtttgtagctggaaggtttgcagcgaaagaggcgtattcaaaagctgtaggtactggtatcggaaaagaagtgagttttttagatattgaagtgaaaaatgatgaaagaggtaagccaattctgattacaagtacagagtatattgttcatttatcaattagtcatagtaaggaatttgctgttgctcaagttgttttagaaagctcgtcacgctagtctgcatattttatatctttgtctcatatatttgaggtagcgataaggaaggtacatcttccattcatttataggggcaaaggggctgaattgatgaaaaggcgtctgtttttagttcttgtcggtttgttgaccgtttttgtgttggcgggttgtgtggaaaagaagcaagatgatgtcgtgagagatttagaatcaaaagtaaaagggatgaaaagttatcaagctgaggcaaaattatctattaaaacaggcaatgagcctcaagagtataacgtagagatttggcataaggaaccgtctttttatcgtgtgaatttaaagaatgcaaaaaaagatcagagccaaattattttgagaaatgaagaaggtgtatttgtattaacgccagcacttaataagagcttccgttttcaaagtgattggccgcaaaatagtagccaggcttatttatatgaatcacttgtaagagatattttgcaggacaagaaaaaccttacttttgagaaaacagataagtattatatttttaaaacaaaaacaaactatcaacatcaaaatatgttgccgagacaagagattacattgaataagagcgacttgactccagtttcagtgaagttactggataatgatcaaaatgttcttgtgaaagtagatttctctaaagtgaaattcgatgcgaaatttgataaaggtgcatttgatacgaaacaaaatatgtctagagcacaggtagatgttcaaacaacagcgaaagaagacaaaccgtttgctattttgtatccacttgatacaccacaaggtatgactctgaaagatgaaaaagagttgaagacagacagtggcaagcgtgcgatactcacatacactggaaataagaaatcctttactttaatacaagaaaaggcaaaagttgcagaggcatcatcagcggtaagtgtaagtggagaaccagttgatcttgggtttacgattggtgcattgacgaaagactctgtaacgtggtcgcataacggagtagaatatatgctcgtgtctaaaggtttagagccgaaggagctgttaatggttgctcgttcagttacagcgaagcaggtgaagtaaacttcttagacgtggtgatatatgtgcaccacgtcttttcttagtttgaaggtggatttcataaaagaagcatataaaagaataagcttcgcatatcgtgtataaggaagtgtatttatggaagaagcaccattttaccgtgacacttgggtggaagtggatttagatgccatttataacaacgttacacatattaaagagttcatcccaagtaatgtagagatttttgctgtagttaaagcaaacgcatatgggcacgattatgtaccggtggctaaaacggcattagaagcaggtgcaacaaggttagctgttgcttttttagatgaagctttagtgcttcggagggctggtattactgaaccgattttagtgttaggtccctcgccgccgcgtgatgtaaatgtagctgctgaaaatgatgtagcgctaactgtttttcaaaaagaatgggtggaagaagcaattaaactttgggatggttcatctgtaatgaaattccatattaactttgatagtggtatggggagaattggaatacgtgaaagaaaagagctaaaagaatttttaaagagtttagagggtgcaccgtttttagagttagaaggagtatacacgcattttgcaacggcagatgaggttgagacttcgtattttgataagcaatataacacgttcttggagcagttaagttggttgaaagaattcggagtggatcctaagtttgttcatacagctaatagtgctgcgacgttacgttttcaagggattacatttaatgcagtgcgaattgggattgcaatgtatggattatctccttctgtagaaatacgtccttttttaccatttgaattagaaccggcgctatcacttcatacgaaagttgctcatattaaacaggtaattaaaggtgatggaattagttataacgtcacctatcgaacgaaagctgaagaatggattgcgactgtagcgattggctatgcagatgggtggcttagaaggttacaaggatttgaagtgcttataaatggtaaaagggtaccgattgtagggcgagtaacaatggatcagttcatgattcatcttccttgtgaagtgccacttggtacgaaagttacgcttattggaaggcaaggagatgagtatattagcgctacagaggttgcggaatactcagggactattaattatgaaattattgcaacgatcagtttccgtgtgccaagaatatttatacggaatggtaaggttgtagagataattaattacttgaacaatatatagaaggtagtatgattgcttcttgtcattggagtgactgttcattgctggataataagctctttttgatgagaagctttttacttataatcattttttatataagttgcacgtaagttttgaagaggagttctattgtttttagttagttatgagataaaaaatttaagaagatgaatgttttgtttgtgaattggaaaacataagcaaggaataaggaagtctttgcaacaggctccatacaatggtattattacaataggtgtcatatatatatttgggtgtgtagttgacggtggaggtgtatttttgtgtccgaatcaagtgtaactactgaaatcgtggttcggttgccaaagcaaatggtaacggaattggacggaattggaaaacaagagaataagaatcgccatgaactaatttgccaggcaacacaattgttattgcgtcaacataagacgaagaaacgctaccaacatgaatcaatgcgacgtgggtacattgaaatgggaaaaattaatcttggtattgcatctgaagctttcttagcagagtatgaagcagctcatacagtagaacgcttagttagcggggggtaatattttgattgtaaaacgcggcgacgtgtattttgcagacctttccccagttgttggttctgagcaaggaggcgttcgtccggttcttgtcattcaaaatgacatcggaaatcgttttagtccaacggtgattgtagcggctattactgcacagattcaaaaagcgaaattacccactcatgtggaaattgatgcgaaaaagtatggttttgagagagattctgttattttacttgagcagattcgaacaatcgataagcaacgcttaacggacaaaatcactcatttggatgaagtgatgatgagtcgtgtagatgaagcgttacaaattagtttaggactaatagatttttaaatcggcagtttaagttgctctctttgaagggcaactttttttattatagaggaggttacggttgtatatggaaatggtagataatcgacaagcgttaatgaaaatgttagtgaaagaattaggctttaccgaaaagcaagttcgtcatgttattcaattaacagaagaaggtaacacagttccatttattgctcgttaccgaaaagaatggacaggctctttagatgaggtgcaaattcgtacgattttagagagatggcaatatatgatgcaacttgaagataggaaggaagaagttcttcgtcttattgatgagaaggggaaactgacagaagagctacgacagcaaattgttaaagctacaaagttgcaagaagtagaagatctatatcgtccatataaagagaaaagaagaacgaaagcgacaattgctaaagaaaaaggattagaaccattagctgaatggttattgttatataagaaagaagatccggctaaaaaggcagtggaatttattaatgtagagaaagaagtgcaatctgcagaagaagctttacaaggtgcacaagacattattgcagaaatggtttcagatgaagctgcgtatcgtagttggattcgaaatgttacttttagaaaaggtgttatgtcttcgtccgtgaaagatgaagaaaaagatgaaaagaatatatatgaaatgtattacagttatgaagaaccattgcaaaaagtagtaccacatcgtgtattagcaatgaatcgtggcgagaaagaagatatattgagagttgctgttgttccgccagtagatgagatagtaacttttttaaataagaaagtaattcgtgataacgattcgaaaagtgcacattatgtacaattagcgattgaagatggttataaacgattaattcaatcttcaatcgaaagagaaattcgtaaagaattaacagaaacagctgaagaacaagcgatacatattttctctgagaacttacgtaacttattattacaacctccgatgaaagggaaagtcgtgctagcggtagatccggcatatagaactggttgtaaattgtctgtagtagatgatacggggaaagtactacatatcgatgttatttatccgcatccacctgttcgtaaatatgatgatgcaaaaacgaaagttctttctattatagataaatatcaagttgaaatgattgcaattggtaatgggacagcatctagagaaacagaagagtttatagtagatgtattacaaagtgtgaaccgagatgtcttttatattattgtaaatgaagcgggtgctagtgtatattcagcttctgatttagctcgtgaggaattcccaaatttacaagttgaagagagaagtgccgtttctattggaagacgtctgcaagatccacttgctgaacttgtgaaaattgatcctaaatcagttggggttggacaataccaacatgatgtatctcaaaagagactgaatgagtcattaacatttgtagtagaaacagctgttaaccaagttggggttaatgtaaatacggcttcggttgcattgttacaatatgtttcaggtttatcgaaaactgttgcgaaaaatattgtggcaaagagagaagaagatgggaaattcacgaagcgcacggaattaaagaaaatcccgcgtttaggtgcaaagacgtatgaacaatgtataggtttcttacgtatactagaaggagcgaatccattagatcgaacaggtattcatccagagcaatataagaatgttgaattgttattgaagagtctagggttatcgatagatgacgtaggacaaccgcaattacaaaagagattggaagaagtagagatttctaagttatctcaagaaacaggagttggggagccgacgttagttgatattatagatgcacttattagtccagaaagagatatgagggatgagttgcctaaaccacttctgaaaaaagggattttgaaattagaagatttaaaacgtggtatggaattagaaggaacagttcgtaacgttgttgattttggtgcttttgttgatgttggcgtaaagcaagatggtttagtacatatttctaaacttagcaaacagtttgtaaagcatccgttagatgttgtatcagtagggcaaattgtaaaagtatgggtagatgatattgatacaaaaaaaggacgcgttgcactatctatgttgccgattgaatagtaagagaagagagcagatgaaactgctcttttttttatggaataaaaagtgtaatggattatgagctttgatgtattttgctataataaaaccagcattcatttaataatttaatttgataccggtttttttcgaaatatgcacgttgcatttgtttttttagccacgtaggcataggaatccctccttgtttaatcctgctctcaaaaatctaaaatgctattgatgagaggttggtgagtggatttctattcatgttttgtttttagaaaccacgcttcttacatgaggatgggtatatgtactatttaatatatgtataagaagggagaaaagtgtaaaaatatttttttgtttaggaggaatgagagtggatgagcaagaaattcagcgactagtggaagaagtgtcactacaatactttgagatgccgttcttacataaagcagtgtttaacaatagattacgtacaactggtgggcgttatttattgaagagtcataatatcgaactgaattatcgatattacgaagtgtatggtgaagaagagttagtcgggattattaaacatgagctttgtcattatcacttacatattgcaggaagagggtataagcacagggacagggatttccgtgagttgttaaagaaagttgaggcaccacgtttttgtaaacaaatgattaatgaagagaaggaaaaaaagatttataagtatgaatgtatggagtgttcacttcaatatgtaagaaggcgtcaaataaatacaaaaagatatgtctgtggaaagtgtaaagggaaactcaaaccgatatcgaaaacatcttgacagtaaaaacgcaatccagtatattataaacatgtcacgtttgaacaagatgttgttaaaaacttcttgacttacagagagaatttttataagatacaaattgtcttcattattccgcagtagctcagtggtagagctatcggctgttaaccgatcggtcgtaggttcgagtcctacctgcggagccatacagagaagtacccaagtggctcaaggggctcccctgctaagggagtagatcgctaacgcggtgcgagggttcgaatcccttcttctctgccatacatattggcccgttggtcaagtggttaagacaccgccctttcacggcggtaacacgggttcgaatcccgtacgggtcaccacttttggaggattagctcagctgggagagcacctgccttacaagcagggggtcggcggttcgatcccgtcatcctccaccattatctttccccgttccgcctcctgggtttcctccggttccgttgtctgttcccgttccgcctcctgggtttcctccggttccgttatctttccctgttccgcctcctgggtttcctccagttccgttatctgttcccgttccgcctcctgggtttcctccagttccgttatctttccctgttccgcctccttggcttccttcattattgcctgttgtgttttccatttttttgataataggcgttttagcattgtgtactaacggcattatgccatactgtgatttatgaaccacattttccaccttgctattttccgtttgtgttcctttatcttctttgttaggtttttctttttcaggactagtttcttttttatgagtcccactcaattcccactgccacattacaggagagaaaacatctatattgatgtttggatcttttaacttcacatgcagatcaatctttatatccccttcattacgaggagctattgtaatttctcctgcttcgctttgaagaaaatcacttgtacgatcctcaccatcaatatgtaagaatcctgtacttccatctagtttaaattcttctggaatctttatcttcaaaatttgcggagattccattttaattactttcgcagtatcactaaatgtaattccctctgtataaagtctatcctttacttctttaatagcgtttcctaaagatattttatttacaggatcataataaaaattattttctttattatatttttttgtaaattgaattacattttgcagttgtaatttcgttgtatctggcaaatcactttgaccgatttcttccatgtttaaactaggtaatttcgcaattaaattctcgatttgtttctttattcgagcatctggttgtttcattaatgtatttatgaagatttcttgctttccatcattcgacatagattgctttaacttcttaattaccgtctcttgaatatcactttctaactttcctgcaagttctgtatcatattcagatacttgtttttttacatctgctaaatatttttgaatcgctgcagcatcagttaaaatattcggttctttctctgaaaacgtaaattgatttgaaataattttattagcggattccaatgcacttaattgctttaaagcatcgcctgtattcatatcattcatatattgattgaattgatttgtgaaattattcgctaacaaattgttatcagtttgcattttttgaaagttattaaaaccatctaagtacgtactgttagatttattcccttcatctaacgcttgaccgaaaccttttaaaacatcctgaaatcctttgaaactattaacagaaacacctgtataatcttgtactgttttaaattgatttgtgtaatttgctaacggactatgtatatcttttttatacatagttgtttgaacgtttcctttttcaattattttacctatattatcttgtgcaccttgtagcttaccgataatactcgcaaaataaacgtcgattatttgcttattgaaatcttctaaaataacagaagctgtattttctgcctcagctttcaaatccttattcccagttgcatttactttgtagtttaacgttaatttctctggaatctctgaatcaatcgcaactgccttcctagaaaaatcatttggaataacaatcatcatattgtaattattatttttcaatccattttccgctaccccgcggctaactacgtaccattcttgtttcgtatttttatttacatttttaacaaattgatctccaaacgctattttattgccctcaaatacagtgccctgatcttcatttaccaacgcaactgtcatttttggtgtagtattctcattagctttcttaacattttgatttaatgctaaataggagacccctgttgatagtacaagagctaaaataataaacaacaagatgctccatttgaactttttcactacttatcactcctgcgactgcgagtctatctaatgaaagacttcgtatcttactctagttttaaagtaatttagccatacaacgtatggttgcatggctaaattatatatttctgtttatctgtcttattgtagaccgaaattacgagaaagatcttcgtcatgtctagcaacagcttctgcagttttattaagctgcatattaatttcttgtaatagctgtgcgaagttttgtacttttggctttaattgattgaactgttgatcaaaaccttcgaaagcacgaccttcccattctcctcttaattcattttgtaaattttgtagttgacgtaaaatgtcctcaatttgatttgcaccttgtccatatcgagtcgctttcgatttaagctcctctggtgacatacgaatttgtcctgccattattaaatcccccttaaaattaaaaaatagtaaaattaaccaataatcaattctacaaattgattatatcaataatttaaaaatttctaaacaaaaaaatgatatttttccaaaatttctcttttactataataacgatatattgtataatactaatttatttgttttttaagcacactctataaatctactataaaataaaggcaaaccatctattttatacttattcgctttaaattccagcgataaagtagccactaaatcattattttctcttctctcattcagactattctactcacttcaaagtcataattacctgcctttcaacaaacccaaactcttcgtacatcttttttgcaaaattcccagtaaatacattcaacctaatttctgaatattcctcctttaattccttaataccagcttccatcagttcacgcgataatcctctcccgcgatattctgggaaaacgtacaattcatatataaatccaagtttttcacgagaaaaatagtctgtattttcccctattaatatccatcccattactttatttgcttctttaatgattaaataatacgctcctttttctacaatcggctttgtaatttcaatcgctttctctgtacttaattgacaatttcctctcgtcccttcaaaaagcgattgagccgtatattttaatatttcattggtatcttcttgattcgccttaattatcatttttcacaactccccttgaataataggcattactatcgcttgttcaagattctccgcttccataacaattgccgttaatccttgttctgtacttgtttcatgaagctctcccttctcccaaaacacagcttgtcccgcctctacctttatcttttttttatttgccccacatacatatcctgctccgtccacaataagaagcagttgagatacaactgcttcatgattaccgatgattccattctcgtgtaaatgcatagcaccgatatgtatattccctctatggtttactattttcgacatgatgaaattagattgaaatactgataggtgctttcctactttttcactaaaatcaaaaattttcattgctagtcctccttatacatataaaaccatccttactgtctgcatcatatgtccttcaaagtcttcttcaaattgctctaattcagcaaaacctttcgcttcataaaagcgttttcctttttcatttgctgcttctacatgtatgtacaatttacgtatcccatttaattccttaatccctctttgtaataaagcacttccaatcccttttccttgctgatctggtaacaaataaatcgcacctaattccgcttcattttgtagtctaacaggtgaaaagttcgcaaaccctattacttctccttcttcttccgcaacgaataaatgcgtatttttaagacgatatttcattttttcatcagaatatgcctcgtctaaaaaactgtcttgaatttctcttggaataatgccttcatatgtatcatgccaagctatttttgctactgattgtacagcatgaatgtcttcttgcttcatttctctaattatatatgtcatctcgatgtctccattctctttaaattatattctgctaatatactagaagaaacggcaaaaccattttcataattcaccttaattaattttaatttctcaattgaagctgttgcaaaatcaaactttccataaatatattccattacacttaaaaactgctttgtatgtaatctatttgcaattgtacaatgcggaacccattttcccggtacgtaatatgaattggggttgtcatgaaaagttttaaaataatcatgataagaataatgaagttttaacaattcatcggtaacggtcggcgctagaaagaccgttccattagtaggaaaaattccaacagaaagaaaagttactgcgtccatattttcttgaatagctacaaactcccctagtttctcagtatacaaatgaacatctaactcattataatccgcaatcgttatatgaggttctactccagctagttgatttgttccaattacatttgttaattcattttgcagttctgtaattttattagtaaacacacgatcaaatgtagcaataatagcgtacaatctttctcaccccttcgttacacatagcgcttcccattcttcacgaatcatgcccattcgaatagaatcatagtatgttccgttataataacgacactttcgcattctaccttctaagctcattcctattttctccgctactttcatcattcgttcattaccagaccaagtcgtgattcctactctaccaatctccattttttcaaatagcaaatctctatataatgtcaatgtttctgtaccgtatccaccattccagtatgttgggtcataaatcacaagccccatctctaaccaacgcgtcggtttgtattcccaataaaacccaactgtcccaatgatttgaccgttattttctataattaaattggatagcggttcttcttttaaacgagtttgcatcttttccttataggatgagtattcttgcattgaaaacggaaaatacggtgcatcccattttttccattctggattttcttctttaaacacgagattccataatgtttttatatctgattcttcaattgtacgaattgttactttatccccttttactattacgctattcataatttcctcctacactcctctttatttcatatataattataatattttttctgaaaaatcaaaacaaatatcatttattatattgtataattttgttataaggtacgaattattcatgtagaaagctggtgattcaatgaataaacgatttagtattgctttatttcttactattgttacgacaaatattattctctatttcttcttaccattaagtattgttacgaaatgggactttaatggaacgcctacatcaacaatggataaaaccacttttgtaatcgtaaatataattatatgttccttcttattctttgtatttttagctttatctaaagcagcgagtaaccagaaatttctccattggatcggcaacacaatgttactattcttattttttgtcgatattgtcatcgccctcatcgctcttggcttttcacttcctcttgatcatttcatatttttagcattagggcttttatttatattaataggttatttcagttccaaaattgatacgactaaatcaaccgtttcattagaatggaatgataagcaccttgaaaaaagagcttcaaatattagtagtatttcaatgatgatagcaggtatttttttagcgatacttccttttatcgtttctgctccctatagaggttatgctatactagcaattcttttaggaatgacgcttatcattctgccaagtacgatttatttacttattaaagacagcaagcaatctactcctttaaaaaaataggaggttatatccctcctatttcagcttaatgttttatttttcactttttctatctcaactaaaatccctttctctatccaaccctctacgccatcttttttaattaaatcatatcctgaacagctatcatcaatgagagaaacgatatctcccttcctaacgcttatttgcgcacaagaaatatcggttttcactgtatattcacctgacttaagttgtttcatatattcattttttacagtgagcacattattcgtttccttttgtttacatacggtgtaatcttgcatcttctcgataggctctatgtaataatacggatatgtcactccgccctgcatttctgaattcgcattaaaatccgctattacttcgtactctggaaaatagtctacatatgtataagaaaacgtatcgcccgtttgtttcctctgaataataaatacgtttaattgccctgcttctttaattgcatttcctccatcaattgcaataatttctttctccttatcaataactggattattagacggtgcttcttcagaatagttcacgacaggccaatgaccgactattacatacttatttgctttatgtgattgattgaaaaactccggcattgctatcgcatttttgcgctcagtttctttccaatctactctatcttctagaccggcatgcacaaaaatataatcttctgtttcaatcgctgttggcaactctgttagccaatatagttcttgtgaaaattcacttaacaatgcttctttcacttcacgaattgaagtgccctcatgaactgaaaaaaccaattgctctagccattcattaaaaattgaatgcttcctcgtacataaataattaataagaccaggattttcatttagaagagcatcaactaaaacttcacaattcccttcaacaacgtgaacctttgaattgttctttacaagattcataacgtagtttactacgcctacgctatctcgtcctttctcgcaaagatctccattaataattaaataatcttcatctttaaagttaactttatgtagtgcttcttttaaaagatttaattctccatgaatatcagatatgacaataactctagcatcattagggattgatagtttctttatttttttcaagtataagcgctccaatcatcctctttattaaattaaaacaattcgacaaaatacactatataaccttttcaagtacatataccataacttacaacctatttacggttcaataataacttaaaaaataagaagaagctgttcccaacttttgcaggacagcttcttcttattttttataattctttataaaaagaataactcaccttatcatacccttctctttcataaaaacgatgagcatcaattcttgaaaatgctgacgtgaggacgatagactcacatccgttttcctttccccagttctctatatacgaaagtaatactttcccatgtccttttgaacgatgtgcttctgctgttacaaggtcatatacgaaaacgtgtttcttattataaaagttcgtacaaatcgctacacctgcaaggctaacaacttcatcattctcattacgcagcgaaaatagtttataattttcttctttcatatttcgaaataaagagcttgtttcctcttttgaaagtttcattcgtaattgctgtaaaacaggtaatacttcatgtaattgctcttctgttactacttctttaacattcatttttaactctcctctaactatttatttaattttctaaatgttatatcattattatagaaagtaactgcccttcacttaagtgacagtttaagtgttttttataaggccagttttaaaggagagttttatatggattttactatcccattgcaattacaaagtaacacacctatttacttgcaaatttacgaatatataaaagctgaaattatacaagggactatttctgtcggcacacgtctaccctcacacagaaatttagcatcacaacttaatattagccgcattactgttgaatcagcttatcaacaattattagctgaaggttatgtagaaagtaaaccgaaacgtggtatttttgtagcaaatttcgatattgacgttatcccaaataaaaagccaaatgcagcaaagaagacgagcaatttgatagacgaaaaatttgaatatgattgtagccaaggacttattgatcaaaatgcatttccgattacaaattggaaacgagcattacaagaatccatacttacatacgaaaatgcactatttgccaaagaagaccctcaaggtgaattcgctcttcgagaacatatatcaacatatttatatcattctcgcggtgtccattcttcacctgatcaaattgtgattggcgccggaacgcagccacttctctggctactacttcaactgcttggccctacaaaagaatacggcattgaaaaccctggatttcaccgtatacacgcaatcattaaaagctgtgatagacaaattcatcccataccattggatgaaaaaggtattgatatttctagtttatacaatacaaattccaatgtcgcatacgttacaccatcacaccaatttccactcgggattattatgcctttatctagaagattagaattgttaaagtgggctaatggttgcagcggatacattattgaagatgactatgacggagagtttcgctacgctggtaagccgattccttctttacaaagtcttgattcaaatgaacgcgttatttatatgggaactttctcaaaatcttttttaccttctttacgaatgggatatgttgttttaccaccacaccttttaaaaacatatcaagaactgcatggaattttcaaacaaacagtcgctacaatacaacaacttgcttttgctaactttatacaaagcgggaattgggaacgtcaccttaatcggagtcgtacactatataaaagaaaacatcatgcgttagtaaaatccattatgaaagaaatgggggctaatgttcaaattcttggcgaacagtccggacttcatattgttttatgtgtccataacagtatgaatgaaaatgaactgattgaatccgctaaaaaacaaagcgttaaattatacccactttctccatatgatttcgtgaatgatttacgtaaggaatcatacgtattactcggctttggtagtattccagaaaataaaattgaaacgttggctagattattaaaagacgcttggtttcctagttgcaaggaaactttttaacagtggatttaacttgtaacatgttaacaattcaacaaaataaaaaagaaggctgttccaaaataactttttggacagccttcttctagttattcacctgacctagctttccttcccggacgtttcacaccagtcgtttctgttgaataggaagcttcgattatagcggctggatctacagagagaacgagatctttcattttcggataaatgaatcggtttgtaatgcaataaatgattctcttatgctcccctaaaaaaccaccttctccatgtagatacgtaacagatagttgcaattctttcataagtaaatcgcctatttctttattcttaccagaaataatcataacgctcttaccttgattaataccatctaatataaaatcaatcatcttcgtaacaatatagaaaattgctaatgagaacatcgcttgttcgattgaaaataaaatggcaacaaagatgaaaataactgcatttactgcaagtaaaaatgtactaatcggtacattaaagtgtttattcatccaaactgctaacatttccgaaccgtcaattgctccacccattttaacaacaatcccaacaccaattccaaacagtactccaccataaagtacaattaataactcagaagtcgtaattgctggaaatggttttaaataaattaatccgagtgttgtaactacattcgcataagatgtacggataaaaaatttctttcccattacttttgcagtaaataataaaattgggatattaattcctaagaacacaccataaagcggcaatcctgcgactttatttgccataatagcaatagccgttaccccgccatctactaatccattaggtgctaaaataagctctaatgaacctgctactataattgagccaattgttaataatacgtattcaaatactttcttcattcattacccccaaaacttatatattttcttagtattattttaacgtaattttactactaattcaaaggtatcgatttatatacacaaaagtttctcctttatcgctatttttatgtaacacatgtaacgcgtaatactaaaaacacacttacaaattaaaagtaagtgtgtttttaacatctatttaatctttacgtacggcttcatttttaatttgaatatttcctcaactgccctttgatatccaccggcatttctaagcgactctcccactttacgactattctccttaaacgtcacatcatccattactttctttacagtctcacgtaacaattcagaagttaactcgttgcgattaagtcttattcctgcccctacttcagtcaatcgttttgcaacgaatggctgatctcctgttaccggaattacaactaatggaacaccgtaatataacgcttcactcgaactattcataccaccatgtgtcacgaatacatcagcatgctgtaaaacttctaattgcgggacataattatacaacttaaagtttttcgggatattttcaaattgacttatatttatcttcttaccaacgactaatacgactgtcgcatcaacatctttaaacgcttcaaaacatttttcatacaaagcaggttgttcattaaaaactgttcccatagaaatgaaaatcactttttcattttttaaatcttcggtaggaaaactccccacttcttttcgagtagcaattgatggacctacaaatttatacgattcatcaaatacctctgaacgtggctgatattcttttgaagtatatacaatcgtaatatcaccaggatggttcataatatcatacatactattacatttcattccatactgcttattccatctttccattcccgctaaacaagattgatataatggatccatttcatctacttgtctcgcttcttgctcatcatgaaaattaatgtactgattaacagcaaacgttgtacaggatgaaacgcttggtaattgtaaaatattcgctataatacgtcctactggaaaatgattatcatatattaaataatcatatttttcctcttttgtttcttctacaatttgagtaacaatacgctctgatgcttcaatcatatgagatagcatcgtcaaagggctcccaccttcatttactcgttccataatattaatttgagagagaaaattctcaaacactcggaattccgcacctgttgcttcaaccttctttctataatcttcaatacaataagaaacaactgtttcccctcgctgaattaactcacttacaacagctaaagtcggattaatatgaccttccccaggaaaatttattacgagtacatttgccataacattctctcctatccaattaatataataaaattaacaattaattatattaattaatttaagtctattataaatgaatgcattctacttcttcatgcttttctcttcattttattattgagaaatattttctatagtctacattattgtgattcacaatcttataaatgaatgcttaattttacttttactcttcatagatttaaagatacgagtcttacattcaagtattaccaccattatttttagacaattcatacaaaaatagagaaatataatatttttaatgaattttcactataaatgtaagtatgctttcaatctttttatctttatcctcataacacatcatctgttatataatgaatttatagaatttacagaaaaataagcacatgcctttaaaagtggttacgaattatgtctattcctcacttagaagaatatagacagccttatcgttatttataccgactgttatctgtgcaaggtaatgtggaattaaaaaaatggttaagtcacccatcctatttttaaatacgaatgagagggaatatacaatggatattcagaaaaagcgttctgtaacagaaagtgaaatacagcaaatgaaggatttggcttatatttgtgggcaacaagacaatcttgattactcttcagatttacatatcaactttttaaaaaatcgaaatgaagattatataaacgattttcttctttataacggtactcaattaattggcgctttaaatatgtatgatttcgaaagaccaacaaagcttgaactaataggctttgtacatcctcattttagaaaacaacgcttcggaactatccttttacaaactgcaatgaaagaaatacaaaatagggagacagatgaagctcttcttattattaatggggattctatttctgggaatgaatttgtaaaacatatgaagttaccatatttatatagtgaatatagtatggagtgcaaaacaaacgaaattcaaaaaacaacagataataatatacagcttactcttgcaccttcagaatcacttcttgatcttattaaaatttctagtaaagcttttggtgattcagtagaaaatacgactacatggttacaaaaaatgatgaattcatcttcccatcaagtttacagtgcccttattgctgaaaaagtgataggaacaattacagtttctaaacaagagcaatctactacactatcaggattcgccgttcatccttcttatcaaggtaaaggatacggaaaagatattctttgtaatatagtacatacccttattacagaaggagtttcaacaattgaattagacgtcgaaacgaaaaatatccacgctttaaaactatatacacaatgtggttttgaaattaacacgaggcatgactattataatttaattaatttttaggtgaatacatatgttaaaaaaacaatttattctaattatgatattttagcagacatctataataaacattggggacattttgttgaatactcccatccagcctcgttttacaagatgctcttccctactctcgtatattagatctttgttgcgggactggtcatctctgccggtgatagtttaatttagttgaactaaaaagtgtgtttcacaaagtttactccgtattacataacgagggtatattcgcatttgatatgaataaaaaaataaaaaaactgaatcgaaatgattcagttttttcttaatatatttacaactgcagttgtttcgtcattttctttatagacacgcggaattcttctatctagcatacatgtaacttcatagtttattgtacctaacatatccgctatttcttctactgcgatattttcttcaccttgtttaccgtagaatactacttcgtctcctacttgtactggcatcgcttttgaaacatccaacattaactgatccatacaaacacggccaataacaggtactcgaaccccattaattaacgcatagcctttattagataattgacgattataaccatcagcataaccaattggtacagtcgcaatccattcttcaccagttgttacatacgtattcccataacttacaccacgattcttcttcgcatgtttaatatgagctacttttgattttaacgacaacgcaggctgtaaagaaacgactgaatgatccacttcttttgatggatacataccgtacactcctattccaacgcgtaccatattttgaaatgtgttacttaattccattgatcccgcactatttgaactatgaatatatggtatttgaattcctaattctttcgctgtattaacagctttttcaaataaacttgtttgcatattcgtatatgatttatcgatttcatctgccgtagagtaatgcgtaaacatccctactacctctacatactccatacggtttaattcttctaaaaatggtttaacttcttcttcttgtaaaccgatacgactcattcctgtatcaattttcacttgaatttgtactttcttttgaagacggtttgcaatttcatttataccatgtaaatcttctactctataaacagtcatcataacgtcatattgaattacatcttctacagccgctactggtgtgtatcctaaaattaaaattggtacagtaattcctgcttctcttaattctattgcttcatctacaaatgcaactgcaagttgatgtattcccgcttcaattgcagctttggcaacttcaactgccccatggccatacccattcgcttttacagcagccatcatcttaatttcttcatcatttacatgttttttaaattcttttacattatgttttacagcatttaagtcaatttctacaattgtatctcttccatatttcaaactcattggtctaactcctaactcaataattgcattccattctatttcacgtttcatatgaccttttacaatataatacttttcattatgctagtcaaactactagaattttcggaattttgagtatgatataatatcctcaagaaactattatatacggagacgaggagaattacaatgtttgttcaatctgcattgcatcaactaaaagttgctattgatacttctatttatatgcttaaccaatatagtgaaaacgatttaaaaatacaaccgattcactcaaaacgatcattatttgaaatgtgtgcacatctttctcttatttgtcatgctgatttactcattttaaatggtatttcagaaaaagaattacataccttttatatagaacatacacccgtaacagttgctcacatgcaacaaacgatgattgaaggatacaaccttctctctaaaacatttctttcctactcccaaatagaattagcaaaagttatgactgcctattgggggatttcttattcgcgctttgaatggttacttgaaatcgttgcacacttttatcatcatcgtggacaaattcatattttattatgcgagcatatgaaagatcctcgcattcctttatttgagtgattttccactcattcattaattagctacaaaaccaataaaaagtatcattcctaataaaataaatgtttgagcataacctcctattttcataagataaatagaaatgataggtcctatactagtacctaaaaataaaataaaagtatattccccttgctttccctcctaattgacctccaagagaaactaaagacggaacggatatagcaatacctattacaaaacagacactcatcattacaagtagagatagatccgaaacaaagcccattgaacttagactaaaaataacaatcaacaatcctccttgaagaactttccttacttcaaacctctttgttaaaagacctgcaagtggtgacagcaacataccaaacagccctgctaagcgaaaataaaggatttgttctgcagttaaattgtaagtaggagagctcaaataattccctaaaacagtatacatattaacaaaagccattattaaaacaggatttttcacactgactaactattagttttaaataattcgcaacttctttaaggcataagaaattccgccttcactcgccttcgttgtaacgaaatcagcccttctcttcaactcctctccaccatttcccatcgcaactcctaatcctacatactgcaacatctcaatatcatttccaccatcgccaaaagcaatggcttctaatttactaatgtttaaatgttccaatactttttgaattgcagttagcttcgatactttactatcttccaatacatttataacgtaaccatgaaaacgctcaaacgtaagtgctggatatctttcaatgaatttttgagcttctgtatcatcagcatacagacatatgcaatacatctcatctgataagtttctaactttgtcaggataccgctctaaatttaaagtttcatttaacgctcgcatgacacgttcatctttggaagcaatattattcattgcaaattcttctgtaaagtaagaaacactgtgaccatctattatgtataaaactttaatttcttaaaactgcacaaaatggctatattacgcagttttgtactgcatctaattttataaatggcaacatatttctggtcatttgtgaccaaattcgttaccgaaataattcaaaattaaactaataaaaaataaaagagcacagcgtgtataaagagtgcgtcaacaccctttataccgtccgcctacaccaactaggcaaacacttgctgtaactctttatgtactttattttaccgtacgtaagggttcttccgcaacagtttgcttacattttgtggcatactgttgcttttttattttcaaaggagacgagcccttatgaaaaagaaacaagccatcaccattcttgctagtatagaaacatatgaaaacttagtatcttttcaaaatctcaaggagctaaatgacactgtacgcgcatataaagaacaatttgctgatcgattaaataaaaatcaattggctgtactcaatcacttacacacccattcttgtaaatattttggcgtttcttttaaatccaaaaagaagattgctgaagtacttcatattagccgcagaacagttattcgtgcatgccaacacttagaatcacttggtatcatcaaacaactagaaatgaaacgtaaaagtgatatgagacaaacaagtaacattattgtaatccaaccaatcttcacaaaagacgagtttgtcacagaagcccctactaaaactgtggaaatttgtcacaccaagaaaacaactactaaaaccttaaaacaaaagataaaagatataaataaacgtaaggtagattcagctgacacaacacctgaaaagaatgtacaacaagcaaattttattgcacactgggttccagaacgttttgcttctctagcctctgcttattattcaaaagcgagaactattcaagaattttggaaagtagtaaaacagtgtaattgtgtagtaaatcatacaacaggggaaactgcttttgataaagaacaagaattacatattggtgtacaggccatgaaagaatttgtgatgaaaataaaagatggagcccgcatgaaaaaaggatggttctcctatttcaatggtatcgtaaacaacttgatgaacaaatattattttgaccccgaatttggtatgtgatatcttcttttacacttcaggtaccacatatacctttgcatatacactatgctgcacagcaaattgttctagcgtcttttgcctatatggtgtgattgtaaagaagtgaacaataggaactttcccgttatatttatttttataatacaaggtgaattcaccatacttattcattttttcgctgttcacattcatcatttgtgtacgatctatttcaactgcgtttaaaatcccgtcactatcacggtactttacatctggaataatcgttctcttattttcatgcactttataacgtataggggcttctatctgccaatcttcaggacaaaatagatacaaccacgcttcgttcctcataaggctgtgtgctaatcgaatggtaggtacaaccttttctgtatcatcgaatagcgcacgtccttgtttattgaggtaatatacatgctcttttttataaacggtactattcacatatgggctcaaatcttttagaatacgatttgcattccgtattcctcccatatcgtgaatggccatcaaatgtcttcttgtcgcaaatttcagctttctaatcgaggtcaaaatcatcatctgacgattcattttgatatgtgtctgcatatgcatcttttttcacctcgtattgttttaatacgtcccacatttgttcatttgagatataagggacttgaacttctgttaatcgatctgttttaaaaagcgcacgccccggtatactttcaatcaattcgagaccagtttcatcgatgacaacttgagaagccgtttgagttggtaaccgaaatcctaattttgcatcactgttttgtttgacttgacgtggtaaagtatcgccagtagggtattgcgtgcaaaaaatcaatcgaaatcctaatgctccaccaattcgcgctatatgagaaagcatctgttgacaagctcctaataacttttgttgttcccgattcatacttttatcaggacaaagttctgccccttcatccacgataataaagtagcgttctcttatatttgtttccaccacattggtataatggtgttctttcataaaaagcattttttcttccatcttttttagaatcgcccttaatacctgaaaagcttccattggcttttctgcaatcgactcaatctgttttacatttttgtatggtccgaactctaatcctccttttaaatcaataataaacaagtgcgtatattctgcttgtgcagtaataagagatgtcatcacattctttagaaatacagtctttcccatacgtgttaaaccacctaatgtcatatgtggtgttttatcaaaatcgtgataaatcaattgttctaaactttgcccgattggcacaagccattttccaactttcattaaatttttcgaccattcccacttcttcggtatttcttgatcgaatacacgaatgttcaatctataattgtcatactgaattcgaacaggtttatttaacccttcacttacaacatcttcaacctttcgaataattttacttggcataccaacaggcaactcatacacgtatgttgtacttctatcatcatgagttcgtttcttaaattttggataatgaatcttatcatcttttttgattgcaattcctgacacttcaaaaaacacttgtatcttctttttatcatctattttccttttaaaccgatcacttacgaatgcaaaagttaaagctgtcatcgggacccatagtaattccaacataaacatttctcctttagatatcctataaggatatcattgcactttattggaagcgaacaggactagcatttttgcttgtgaggtctattgtccctctcttccacatcgtattccttcatagaaacataacgagaacgtaacgtagaagatataagaacgagcccgtaagcgttgtatacatagtcatacgtggaagccaatatggaacactcttccccattttttcagctacactcatcgcaactacagacaagcctgttgccgtccaaataataacgacttctcctgcaagtgtcatagccattcctcggtcaattcatctttctcacgaaatttaatccccgatttggtagctacaatctgataccgctccattaaatcttgccaattcaatatatcttcctcttctccatataaatcttcttcaattacttgtgataagctgaaatatcctttgtactctttgttatcaaatacttcatggttcctcatgtgagtaagaattgattccgtttcttttctagatctagattcgttatacatgtgacgtagttcttttgatgaatataaataaggcgttgtattgaggtaactatactgagaacgcatgtaaccctctcctctcttgatatctacaatgccatacggaagtccaagtagaattcttcgtgggcttccgtatggaagtaatataggtatatgaaccagaaggaggattattgcctgtacacctgaaatttattttttaagaggacaaaaatgatttcactagaatatacatactaggaggtggaataatgcttcaaagtaatttaaaacaaattgtagataaaaaaggcttgcgatatggatttatagcgaagaaagtaggtatagcaaactcaacaatgactaatttgctgcaaggcggaacaccgacacttttagtagcaattagaatagctaaggttcttgatatgcgtgttgaaaatatttggattgaaaaaaataaggaggatacataatgaaatttaagcttcgtgttattttatttttagcgactatttttttagcaatcattacctttttcgcattgactactagggatgataataaaatatctaaagatgaatttaaaaacatccatcaaggaatgtctatccaggaagttcgaaaaattattggcggtgatggagaagaaaataaattaactgatactattactgaaattacatataaatcaattgacggtataaccaacggagaggttaaattttcatttaaagatgataaattattttctattggagattttgcctacgcttcatctgaaagtaaaacttatcaatctgatcaaaatcaaaactcaaataattccaatgaaagtctttccacaacaacacttcctacaaataataatttagaaaaaaggattaaggatattgtaaaatcgagcattggttcaaaatcattaacaaatttagaaatcaacaaaaatatggggacagcaactgaagatgataaaattgctatacttactatccacgcaagtgataaccttacagataatatgtttaagcaaggaatgtggatggacacacaaaaaatcttaaaaggtatagccaatgaaaaagaaataagtgagattgctttcttttggcaatttgaaacagttgatccatacggtactaagaaagttgataatgtgatgaaaataatttttaatcgcgaaacaattgataaaattaactttagtaattttatctttgaaaatatccctaaaacagcgaccacttattgggaacacccatctttaaaaaaagaataaattcaaacaaaaataagagccgtcaaatgacggcttttattttttataaaactattcttttgtagaaaatcacttcacatacacataggcttcatttgttgttacatagtatgttttgcctttactattgtgaactttatattgtggtgaaccatttacatttacttttgcatcaattgtaaatcctaatcctgcatctacagaaccagccacatctttatcctgccaagatggagcatcatagaatcgtaggttattaactttagaaacaacacgcttacctacaatagaagaatccactgtactctttttattaaacttcacataagatgggtcgttcttaatccactgctctccaccaagatttaaccaaccatccttttcagcccatacaacataagattctggtttgtttaattgacgaatcttagaatagcttgtacccggtccttttcgtaagttaacgttgtaaccttcaatataagcaataccgtctgttacagctgttggtacttctgctggtttagatggtttttcaggtacagaaacatcaacactagaattgttataagctcgttgtacatcagcacggaattgagcttctgatacgccatgagactttaagtaatcaagtggatcttcatgatctgttccgccaagatatttcgtcacatcgtagtgagtccataatcctttttccacagataaaccacgatcacgtaggattttagcaagtaacttcacatatttatcataactgcgtttgaatttatcgtaatctgctgtttcgcaaagttcaacatgtacaaagcgtttatttgctcctggtccaccaccataagcaatatactttgtatcagcaatttggattgtttcattccagtcaactgcatagtgaacaaatgcgtttctccatgtacgagactcatatttttgaatattgatagctggtgcttctggagtcgccgtagaatgagctacaactccctcataagcgccaacaccgtaacgatatggctgtttaggtaaatctggaataataagtgttctatcagcaaaagcgcttgttgcaatggataaaactaaaataaccgcaaagattacagaagaaatatgttttaatgtctttttcatttttcatcaccattccccatgattttttgtttaatatctgatacatcttttgaaagtgaaccaaatgcttttgcctgttcttcgatgaccgcttggtttttttcaatcactttttggtactgctcttcacgctgctcattctttttttgcgtagtaaaaagcatccacacgaataacgctgcgaatgctccttgttgaaccattgaattaaaaattgcatcctccactgttctcatctcctcgtatgattaagttaggtttttagggacgggatgtacctataaatccaagggtatctatttttatgagatactatttctagctagctttttagaaagaataacgttttttgacacttgggggtagtgcaaattcttaagttgatgggcatggggtattcacaccactttggcgtaaaataggggctttaattaaagaacacaatttacgaataagttttcatccaaatcaatttacgctatttacaagcgacaagccacatattactactaacgctattacggatatgacttatcattataaaatattggatgctataggcattgcagattcttcttacattaatattcatgtaggtggagcctatggaaataaagaaaaggcaattgagcgcttccatgaaaacataaaaaaacttcctacacatataaaaaaacaaatgactcttgaaaatgatgataaaacctatacaaccgctgaaactttatccatttgccaaaaagaaaatattccatttgtatttgattatcatcatcatatggccaatctttgcgaggaaccactagaagagttgcttcctgcaatttttgaaacttggtcacatacaaatatctctcctaaagttcacatttcctccccgagatcggaaaaagaatttagggctcatgctgaatatatcgatttagagtttattaagcctttcttacacattgcaaaaaaacacaatcataatttcgatattatgattgaaagtaaacaaaaagacttagcactattccaattaatagatgaactttctgctataagaggaattaaaagaataagtggtgcaatgttacagtggtaaattgtaactttgcaccattttttcaaaaaagtaatttttatagtaaaaaacattctgttttatatgctattatttaaattagcattttctccccgagattcaactttattgaaacggagtcataatatgattaatcaaaaaaagtatatacaatctgtcataatatacatatttatatttgctctttggatattccttataccaaatgagtcgaatataaaagaaatcgggattcttttcttattctgtttcgctgcacttttttcttgctattgcttatgtaaagcgattagaaaaatgacgcatggtgataaattattttggattttattattatgtacttgtctatgcgggttagctatggaaataactttatttcttccttcactttctattcataagcaagttatattctcatataaagcattacctttttttatcatacaatatgttttactctttgttggatttgctataaagtttataaaaatttactctattaagggtcttgctcaattttcattcgatagcatctttattgttattatgaacatttatttcactttaacttttatcttggacctttcaagcttccgtatgttaacaaaggaaacttggattttaattggctattttattgcacaatcattagtaatttacgccgttattagtctatatagaagagaacaatattcttctagtagaatcgcattaattatcggtttcactattatactcgtatacggttacattcatctgtttcaattaaattttgggatgaaaacttctcctgaatttaattatttaatacacactgcttctattttattaattggactttcttccatactatatatcttggataaaccaatgcaacatgaaacgaaagcaaaatattatcgattcgattatgtacgttttatactaccttattttagtataattattactttttcctttattatcattcaaccttgggatgataaatttatgttaattggtctcgtattatcacttattttgttattcttgcggcaactttacatgtggaaagataatcaagcactaatccttacatatgaacagttgactacacaactagaggatgaagttgaagaaggtgcatttgcattatcaaaaagtgaacaacgctataagtctttattcgaagatcatcccgatgccgttttctctttaaatatgaatggcatttttcaacaatctaataaggcttgcgaaagcttatttactgcctattattgccaagtggcaagctattctctggtacacttcattgattcaaaagaccacgaactactaaagaaggctttacaaattacaaaggaaggtaggccacaaacgttagaagttcggacaaaagaacaagaaggctattattattatcttcatattacacttatccctacttttataaacaaagaagtggtcggaatgtttgggatagcacgtgatattaccaccttatatgaaaaacaaaaacaagtagaacatttagcctttcacgatgcacttactggattaccaaatcgccgaaagttcgaaaaagatttaaaagccattttaaatacagctcaaactaacgcaaatgatgtcgccgtcatattccttgatttagatcgatttaaaaaaattaacgatagacttggtcatgacgtcggagatttattattaattgaagtagcaaaaagattacgcggttgcttgcgttcaaaagatatcgtcgctcgtcaaggtggagatgagtttacaattctattaccagaaatgtactcagaaaaaagtgcaatttttatagctgaacagattttaactattttaaacaaaccattcttcattcaaggcgaagaactctctattacaccaagtatcggaattgcgatgtaccctgattatggaactgatgtaaatgagttaatgaaaaatgctgatatggctatgtatcgtgcgaaagcaaatggaaaaaacagatttgttttcttctcaaaagaaatgagtatcgctcaaaatgaaattcaattcttagaaggtgaactttcaaaagcattacaacaaaatgaatttttccttgaataccagccacaagtaagcacaaaaacaaaacaaattatcggttttgaagcattaatacgttggaagcatccaaaactcggtatcgtatctcctgcccaatttatccctctagcagaggaaactggttttattattgaacttggcaattggattttacgtactgcctgtttagaagcaaaaagatggcataatcaaggtttttctcacttaaaagttggtgtgaatttatctgttgttcaatttaaccatgcagatttaatcccaactatttcaaaggtgttggaagagacagaactgaaaccagaagcactagatattgaaattacggaaagcatcgcaattaatcaaaatcaatctgtagttgcaaaactagaacaacttcaaaatctcggtattcaaatttcaatcgacgactttggtactggttatagttctttagcttatttaacaaaatatccaatcaacacattaaaaatcgctcgagagtttatttgtggaattacaactagccctttagaagaagcaattgtctcttccattattacactatcaaaagaactaaatttaaaagtgattgcagaaggtgtagaaacagcagaagaatgggaatttttacataaacaaaattgtgatcacattcaaggattctttattagcaaacctgtttctagtaaagacgtttggatgttactccataaaaaaacaaccgtctaagtaagacggttgttttttagaactcaaaaggtacttcattagctaattgtatctcttgattattatgagaaattatttggtttttctctaatgctgtatctcctaatgaaataccccatgccatcgctaacgttagtaaactaccaataagtagttttttcatattccatcacccgcattttttctttaaatatatcatgaaaaattatccagactttatgcaattatgcatatttgttctttatgtcttttttatttcttcattttttttataagtgattcttttaattcatggtttcctaatatatcaaaaaagaagcatgctttttcgtaagcatcttcaatttctgctctatcacacccaagttttgctaggcattcaccttttcgaaagtataactgcccaatcaatgtcatactgttaattcgacacgataggtcaatggctttatttgcgtgacaaagcgcttcttcgtattgattgtctatgtataatgcttttgcatgattatgtctcaccttcacatcaaactctttattatcatgcaatgcctctaattgttttaatatattttcaaacaaatcaataccctgcttcaaatagccgttttcagcataaatgtttgcaattgcgttttcaatataaaggttctgatatacatctattcctaccagttgttgattgagcaatttctttaattctaaaatgcaatattcgtaatcgatttttttcaatacgtaagcagctacataatattgccattgaagaaattgctgaagctcgggatgatattcttcctttttcaattcattgcatactctattataaatttctttatattttttttgcttacaaagcagaataatttgatcttttaactgcttattcctctcaatatcagaataaataagtacctcataaaaatgaatgatgggaacttgtaattttgctgcaataccttgcaatatatccatacttgggtataccgcgcccgattcaattcgacttacttccgattgatgacatatgttctcggataactgtttttgtgttaatcctctcatcaccctaattttcttaatttcacttcctaatttttctgcgtgcatacttactcaccatcccattataacaatctagttttttaagttgtcataccactacaataatgtgaattcgacaatttttgatatgaaataatgcataatatatatataattcggcaaatttttcatacaattcatctcacatacaataatagattaggagtgttatagatgaattatagaaaacttgctagtgctttcgttacattcggtcttctttgccctttatcaacagaagctattcatgctcaagagttagacaaaagtgcagtcaaagttgaaattgctcagcctggtttaacaatcgggaaattaacacaacctcaaaatgatacgaaagaaaatattgctaaaaagtatttaaaaggtgaggtaaatggggcgaaagctcaacaagaacaagtcactactgaaaaaaatgtagatttccaacctacaaataaagaaactaaagaaaatcaaaccgaagttcgccttgcacaaacatataaaaactataaagtatatggccaagatctcattgtaaaagtagataaaaatggagtgatcacaactgttagtggtaaagttgttcagaatttaaatcaacaacctaatcttactataacaaattttttgtcgaaaaatgaagtaaaatctaaattacgcgatatagttcaaattccaagtgatgcagttgagacagaattctctagcgaaaccgttgtttataagaaaaaagatggctattatacattcgcaactgttattacatttacttatgaaaacaatgaacaaattataaacggcaatgctatcgttgatctaaaaactggcgaagtacttttccaagaaaagttcattaaaaacaaagagaataagactataaatcaagtaacatcacctagattatcccctgcaagtgagcaaggaactgggaaaaatgcacttcaagaaaacatctctttcaatattgccaaaggaactgatgggaaattttatttagcggatttatcacgcggaaatggtatttatatttataatgcaaactacgccgattccctcggaggatatagtcaagctggttatccagggacactaatttcaagtagcaatcctaattttgcagataaagaagccgcgggcgctatgaagaatatgagtgatatttacgattactttaagaaagaacataatctaaaaagttacgacaataaagattcaaaagttgttgctagtgtacacggttttgattctactgaagttagtgatggtgtaaaagaagactatgtaaatgcattttggcatcccgcttggaaccaaatggtatttggtgatggtctagacggaaaactaacatccgctcttgatgtaacagctcatgaatttggacatgctgtatttagtggcacgacgaaaaataaagtcgtgagatatccaagcgctgaaacatctgcactaaacgagggattagcggatttctggggtacacaaatcgaatattacgtaaagaaagataaaggaaactggattatgggcgatacattaggcggcctaacaattcgtgatatcccaaaggaaattggtgacggcggtcataaattatatacaaatttacaagatttctataacgatggtaataatcaagaatcacacgtaaattctggtattatcagtcacgtattatatcaattagctgaaggtaaaacatataacggtgttgctgttcaaaagcaaggaaatgaaaaagtaagtaaagttgttatgcgtacattgcaaaattatgcaacttccgctgaagactttgaatcacttcaatctcatattgtacaagctgcaaaagatttatatggcactgccgtatcaaatgaatttgcaaaggcatttgaagcacacggttacaaaccgttacaaaaaataaataaagtaatagcggtacaataataaaaaagaagtttaccaatcataggtaaacttcttttcatatccatcccttttcttccgcaattgtaattgcttcaattctatttttcgcatcaagcttcgctaatacttcagaaatataattacgtactgtacccggcgaaagataaagtgccttcgcaatttcgtttgccgtctttccttctttcgcaagcaacaatacttccttttcgcgatctgacaacggattttgctcctgccataagccaaacattaaatcttgggagacctctcgtttccccttcattacattacgaattgctgccgctaaatcttcacttgggctatcctttaataaatagccgtgcacaccagctttcattgctctttcaaaatatcccggccgtgcaaatgttgttaaaatcattactttgcatgatgatttttctttctttaacgcttcagcaacatctaatccactttgaatcggcatttcaatatccatgatacttatatccggttttaacgattcaattaattttagcgcctcttccccgtttgccgcttgtccaattacttcgatatcatcttctagatcaagcagagcccctaacgcaccacgaagcatccgctgatcttctgcaataataattcggatcatgccctcacctcatcttttcctgttctaataacaactggaacttttactgttaacaacgtccctggattgattgtacctagttcaacaaatccatcaataagagcaattcgttctttcatgccgcgaataccatttccatcatgattttgatctgttaaaccgattccgttatcttctactttcaaaatcagttcaccttgtgattctaatacagaaactgcgcaccgcgtcgccttactatgttttacaacatttgtaacagcctcacgtaaacacatcccgacaatattttgttcaattggtgataacgagctcgatcttgcttcttgcctcacttctaattcaatattagctgcttgtaagatcgcttttatttgctctagctcttcttctaccgtaatcatacgcatatcagaaattaattctctcagctgttttaaggctgtacgagaagtttgtgtaatttccttcgcttccgcacttgcacgctctggatttttcacaattaacttctctacaagctggctttttaaagtaataagagataacgtatgccctaatgtgtcatgaagatctcttgcaatccgctgccgttcttcacgttttactaagtctttaatttgctcgttcgcctcatctaattgatttcttaacatctttttctgattaaaattacgcataccaaatggcgtaagaagcattaaaataaacatcggaacgatatttactaaacttgtagttgttatttgattcatatttacaaataaaaatgctccaagcattataactaacgagcataacagcactcgaaatactttcttatttggcgcaaatcccatcgcacttgctgtgaaaaagccaaaaaatatcataaaaggattataaaataaagcaaataaaaagatgagtatcatttgaatgcatgcccataaaataaacgtcttctgaacaaaatatagctgacggtatgtgataataaaaagtatcaacataccgcttcctagcacaagcttccaccctgatgcttgtgctaaatggtaaattggaaataataaatacacaagccacatgtacggaaaaaatcccatatgttttggaaaaatctcaatcctcttcttctctatcatttataccgcttcctgtctttttcttatatatattgatactacaacaaatataaggaaataacctcctaataccgcgatattttcccatccaattgattttccagctacaatatcccacgcaccacttccaaaatggtatgttggtgtccattcaccaatcgttcttaagatttttgggaatacttcaatcggcatccataacccgccaactatagctaaactcatatttaaaatatttgctaagccagcagctgcgtccgccttcttaatggaacctattactgttcctaacgctaaaaatggtgttacccctaataataaccataaccccgcaccaatccattgccctaccgttaactcaacatgattaattagtatccctgcaataaaaataactaatattgaaaaagcatttactactgtttgagcgataatttttgctgttaaatatgctccctctggaagcggtgtaatttttaaaagatgtgtccatccttgccctttttcctgagaaagtctcacaccgaaactaaagagtgcagtccctacaatactgaaagttgccatcgaaattaaataatgtgctttccacgcatctccgttttgtggtacttgaacaacatttgtaaaaatgtagtaaaacataacgggcattaataatgagaaaaagataaataatttattgcggaatgtacgtaaaatttctattttgcactgcatccataacgctctcatgcgatttcctccttctgatttgcgacaaactgttcaaatgcctcatcaaggcttccacgttcaactgaaacatctgttacaggtaaactcctttgataaatggcttttaaagttgcatccgtatcctccgttgttaaaatgaagcgtccttcgtttgactttacttctgttacatttggtaattcctttagtaattttgtaggaatgctttcctttgagtaaaatgtaattgtttttctcgaaatcgttgctttcatttcgtctggtgtaacatctgcgataatctttccgttcgcaaataataagatacgatttgctaaagcatctgcttcttctaaataatgcgtcgttaaaataatcgttttcccttcacttgctaactttcgaatcgtttcccaaaacgttcttcgagacgtaatatccattccgactgtcggctcatctaaaaataacaaatccggatttcccgcaagtgcaagcgcaaagtttaaccttcttttttgcccacctgataatttctcacatctttgctttcgctctgattctaaatttgataactgcagtaacgtctctttctctataggattcgtataataactacggaataactcaattgcctcttccaccgtaatactatcaatgacacttacttcttgcagcatcgcaccgaggctattacgaacatctctatgctttggactctttccaaatatagagaccttaccttccgttggttcctttaacccaagcatcatcgacatcgtcgttgttttcccagcaccattcggaccaagcaacgctactatttcccctttatttacatgaaatgaaacattatttactgcgtttttatgtttaaatgttttagaaacatcatttacttcaataatcttttccatctctccacccccgctgtttcttatatttacattgtattccttggaaaacttaggaaacagtatgatgcgtcatgacatcgatatgacaattgtcatgtattctttatgagaggaatcaacccgcataccgcaagcgagtagcaggacgaaaataaacatgatacaatcggataagatatatattcgaggaaggacagtggttttcatgattattcgtaatgaacaagatttagaaggcttacgaaaaatcggccgcatcgttgcgcttgcacgtgaagaaatgaaaaaacaagcgaagccaggtatgacaacgaaagagcttgatttgatcggtaaaaaagtattagatgagcatggtgctatttctgcacctgaaaaagaatatgattttccaggtgtaacttgcattagtgtaaatgaagaagttgctcatggtattccaggagatcgtgtattaaaagaaggcgacttagtaaacgtcgatgtatctgctgcacttgatggctattatgcagatacaggcatttcatttgttcttggagaagacgaggcaaaagaaaaactttgccaagcagcggttgatgcattttgggcagcaatgaaaaaggttagagctggctcaaaacaaaatcaaattggtcgtgctgtttcaaacttcgcacataaaagtggatacaatgttattcaaaacttaactggtcacggcattggtcttagcttacatgaagcaccaaatcacattttaagttactatgacccaatggataatgcacttctaaaagacggtcttgttatcgctgtagaacctttcatctctatgaaagctgatcatattattgaacgtggtgacgacggttggacattcgttacacctgataaaagtcttgttgcacaatgtgaacataccgttgtcgtaacacgcggtgaaccaataatcttaacagaaatctaataccaaaaacggctgttttgtagatttattccacataaaacagccgttttttatttttgggaaaatatgtgaactagtgttgaactctttatcatttaagtatataatctttagcggaggttacttaagcttatctttactaaaaagatattgtaactaaggagtaaaacaccttctttcttattgtttaaacaggctcaaaaatgaccgtagtaacgtgttagtcgaatattctgtaatccttatatttctctaacaatgtaagaaactatcacctttcaacttcggtccactaatcgcacgactctctttagacaaaataaatgactattttcaaagtacatattgtcttcattctgaccaaaaccaaccctatctagatttttatttccacataactttaaggcaaaaataagccttcacaaagggatacactacattggttagtatgtatcgtaaaacttacctttataaccattcttttttactagatatacatgaaaactatctcacatataaaggtctgatatcattatttatatcagtatttttttcgacattttttgtcgaattgtgtatatttccatagaactgtgtaaatatacattttgttttacgttaaataatattgctttgaacataattctgtttgtctgagaacgcgtatagaaacggagggataacaaaaataaatagcttataacaaatacttttaatattccatttgttcatgtggaataagtccccaatggacaaatgaatgttcagaggaggaaaaatgaaaaaactttttaatgtatgtttaattgtattcgtactattttcgcaacttgctagttttccatacaatcaagtaagagcggaaaccttaacaggagattccttatttgacactgttgaaatgaaagatgcgacgaatcatattattgacgaatcaaaaaatcctaacaatttaataaagataggatcaaccattcaagtagaatacgcttggtcaataaaggatcaacaagttgcacacgcaaatgatacagcagtagttcaaataccacttgcattaaaagtatctaaagatttgcaaggggatttagtaacagatcaaaaaaatattggtcaatattttataacagctaaagataataaattaaaattaatatttaatgatcaagtagaaaatttgaaagacgctaaaggaaaaattaaagttgataccgtgtttaacccaactttaaaacctggggaaaaatcagttcaaatcgcttttcctttaggaacaatggttcagcctatatcagttcctgttcaagtagaaaactataaagaagatggcaccaaacaggatactaataaacaagcgcaagatccagtagctaaacctgttactgacaatccggagcaagatccagcaactaaaactgttactgataatccggaacaaaacccagcaactaaaactgttaccgataatccggaacaaaacccagcagctaaaactgccactgataatccggaacaaaacccagcagctaaaattgctactgacaatccagaacaaaagctatcaagcgaccctgctgagaatacaaattcaggtccaaagcaaataacaacaaacattttaaccggtgtaaagttgacggataaagacggaaaaccatttatagaggataaccgtccaagtacagattcccctgccaatattgagtttacatgggaacttttaaaatcaatgaatgtgaaaaatggagattactatatttttgatcttcctaaacattttaagatttacaatacaattaacagtcctttatatgatagtgaaaaccatcaaattggtaattttactgttacaaaagatggaaaagtcacgatgacattcaacgattatgttgaagagcatccagatgttgctggtaacctacaattaaagacagaatttaataaagctgaaattaaaggtacaacaacacaagaaattcctttcccgattaaagataaggatgtttctattacagttgactttaagcctaatgtacaaacagctacgaataaaaagggtttacctgatagaccaattaatacaaatgaaattaattggaaagtagagatgaacaaaacgaaagacacccttaaaaacgctgtttttaaagataacattccacaaggtacaagcttaaataaagattctattaaagtttattatttagaagttgatgttaatgggaatgtaacgcgtggtgcagaagccgagccaacagattacaatattatttcatcagatggctcaaaattggagattgctttcaaagattctatcaataaagcatatcaaatcgaatatgccacaaaaattactgatgaaaatattaaaagtttccgaaataacgttacgataacgagtgataatcaaaagcaacaaaacgcaagctctactgtaacggtttctcgtggtacacacttaaataaaacaagtaaatatgatccaaagacgcaaacaattgagtggacaattacttacaatggtgatcaaagagagatcaaaaaagcagatgcgattttaaaagatatttttgacgatacacacgaactagatgcaaattctattgttgtaaaaaacgcttcatataatgaaaaaggaacgcttgtaacaggagacgctgttaataattacactgtaagtaacaagaagaatggattcgatttacagtttaatgatgatattaatagtgcttatgtgattacctataaaaccaagccaactaataaagttatagaagatggaaaagtaaaaaataaagttacagctgataatgattcaagtaaagaaaatgaagctagcttcaagcagcaaaatattattaaatctaataataaagctgaaacaaattataaagacaaaacaacaacttggacaattatagtaaataataacaactatccattaaacaacgcgattattacggacacctttgatcatggtggattacaattaaaagataagaaactagaaattaaagacggaaattatacccttcaagctgggactgactatgttttagatgtaacagataaaggcttcaaaattactcttataggtacgtatcagtctaatatgacaaagacattagtcgtaaaatatacgacagactttgattatacaaagctagaaagtggtaaaacttcatttaaaaatacaggtaacctttcttggatagatacggattctaatccacaatcaaataaagttgaagctaatttcgattctgatactttcacaaaggcaaatggttataaatacggttcttataacgcccaaacgaaggaaattacttggataataggctttaactataataatgttgagattaaagatccttatgttatagacgtcatacaagataaacaaaagttagtgcctggatccattgaagtgcgcgatatgattttaaatggaaatcctgataatgcacaacctggtaatgctgtaccaactgagaaatatgaacttgaagaacctacagagaacaataaaaacaccctaaaggttcatttcaaacaatcaattaattcaccttactatattatctttaaaacaagccttgatggtgaacttatccaaggcacctacaaaaacgaggcagatttaaaagatggctctaaaatcgtaaacacccttacaggtgacactcaagtaaataaaggtggcagcttcgttactaaaaaagctgtgcaagacgacaactatattaattggagtatcgcaattaacgaaagccaatcaaccattgcagatgccgttgtaacagatgacccaaccgaaaatcaggtaattgtggaagattcattccacttatatcctacaactgttgatccatatggaaatttaacaaaagatacagtaaacgaattaaaagaaggaacagactataaactcaaaataacaacagacaataataccggaaaacaacatttcgaaattgccttcttgaaaaaaattgatcgagcttatattttagaatatcgctcacttattaatgcagacgataaagaaaaagtaagtaataaagcgaaaatcacaggcaataagttgacagttaaaaacacagaaactactgaaacgattgaagtgagaatgtcttctggttcaggcggaggatctgctactaaaggccgtggaaaccttgaaattataaaggtagataacgacaataaaaacgcactattagctggggcagaatttactttatacgatcgtacaggtaaaactgttatccgtaaaattacaacagacaaagacggtatcgctaaatttaataatttaaaacgcgataagtatttattaaaagaaacaaaggctcctgaaggctatgtaattagctgggatttaaaacaagggaaaattgttgaacttggtacacaagagactacaacatataaacttgcaaataagaagtttgtcggtaaagtagttttaacaaagtctgatgacctgaataaaaacgtcacactgcaaggtgccgttttcacactacttgataaagaccaaaaaataatttcagaacacgaaaaattaacaacaaatgataaaggacaaattactgtagataatttaaaaccaggaacatactacttaaaagaaataaaggctcctgagcattatcaattagatgatcgacttattgaatttacaatcgaggaagatcaaacaacagtaattaataaaacggcccaaaacagcttaattagaggctcagctatcctaacaaaagttgataaagagggtaatactttagaaggtgctgtatttagtgtacgggaccaaaataacaaaagaattcctggttataccaaattaacgacaaatggtaacggacaaatcgaagcgaaaaatttacttcctggagagtaccaatttgttgaagagaaagcacctgaaaattatgaaatagataaaaaaccgcttaaatttacaattgataaaagccaacagaaagcacttactgttaccgcgacaaatcacctcattaaaggtggtgtcactttaacgaaagtcgatgatgtcgatggcactgcccttgaaggtgctgtatttaaaattgtcgatgcgaatgacgagaaacaagtaattcgtgaaaatataaaaacaggttcagatggaaaagttaccgttaaagatctagagcctggtgtttataaatttatcgaaacagaagctcctaaggattatacgttaagtacaaaccctatcgagtttacaattgataaaagccaacaagctcttgctactgttacggcaaataacagcttaaaaacgggcgaagttgaattattaaaagttgatgagtttggtgagaaaaaaccacttgaaggtgcagtattcaagcttgtcgatacaaataataatgacgtttccccttacactaacttaactactgataaaaacggtaaagttaaagttagtaacctacgtcctggtacgtataaatttattgaaatagctgctcctgaacattacgttttacgagcagaacctattaaatttacaatcgatagaagtcagaaagaaactctacttgtgaaagctgaaaatgctttaaaaccaggagatgttgaattaacaaaagttgatgatatcgatggtacagctcttgaaggtgctgtatttaaaattgttgatgctaatgatgaaaagaaagtcattcgcgaaaatgtaaaaactggtgcggatggtaaagctatcgctactggcttacgccctggcgattataaatttatcgaagtaacagcaccgaagtattacgacaaaaatacaaaaccaattaaatttacgattacagaaagtcaaacaactcaggctactgttaccgctaaaaacagcttaacaaaaggcggtattgaattaacaaaagtgaatgctgcagatgaaaaggaaacacttgaaggtgcagtatttaaaatcgttaatagagatactaatgaagatgttcgtacggaccttgttacgaatagtaaaggaatgctagttgtagatgacttacgtcctggtaactatgaacttatcgaaacaaaggctccaacttattacgatgtaaatgtagaaccaattgaatttacaatcgaaaaaggacaacaaaaactccttccacttacatttaaaaatagtttaacgaaaggaaaagttaaacttattaaagaagatgatgtggaaagtagtaaagctcttgccggcgctgtattcacattgcaagacgcaactggcaaagaaattatgaaagatttaacaacagatgatcacggagtattagttattcctgatttagcaccaggggattatcaatttatcgaaacaaaagcccctgaacattataaattagacaaaacacctattaagttcacaattaaaaaaggtagtaaggaagatcttcctatccctgttactgtaaaaaatagtttacttacaggtggcgtcactttaacaaaagttgatgatgttgatggcactactcttgaaggtgcagaatttataatcgttgacgctcatgatactaaaaaggtaattcgaaaaggtttaacgactgataaaaacggtaaaattactgcttctgatttacgtcctggagactatcaatttattgaagtaaaagctccaaaagactataccttaagcaaagaccctattccgttcactatcgaaaaaagtcaaaaagagaatattactgttaccgctactaacggtttaaagaaaggtgcagtaacattaacaaaaattgatgacatcgatcgtacgatgctcgaaggtgcaatctttaagattgtggatatgaatggtaaggaagttcatacgaatcttgttacagataaaaacggaaaaatttctgtttctgatttacgccctggagactatcagttcattgaaacaaaagctcctgagcactatgtattagatgaaacaacgattccatttacaattgaaagaagtcaaacgaaagagatcaatgttacaggcaaaaatgctttgaaaaaaggtagcgttgaactaacaaagattgacgatattgatataaatacaaaactttctaacgccgtatttaatttattagatgcagacggtgagctagttgaagaaggcttaaaaacaaatgctgaaggtaaaattgttgttgaaaatctacgtcctggtacgtatcaattcgttgaaacaattgctcctgaacattacgatttagataaaaaacctatcgtatttacaattaaaaagagccaaactgaaactcttcatatcactgctacaaatgctctaacaaagggtgcagttaaactttctaaagtagacgatattgatggcactgttcttaaagatgcagtatttaaaattgttaatatgaacggtgatgtagttcataaagaccttgttacaaatgaacaaggaataatcgaaattaacgacctacgtcctggtgattaccaattcatcgaaacgaaagctcctaagcattacgttttagatgaaacaccaatcaaattcactattgaaaaaggacagaagaaagttatttctttaactgctacaaatagcttaaaacaaggtagtatcgaattacttaaagttgatgatttaaacactcaaacaaaacttgccgatgcggtatttaatttactagatcaagatggcaaagtacttaaaacagatttaaaaacaaacagtgaaggtaaaatcgttatcgaaaatttacgtcctggtacgtatcaattcgttgaaataacggctcctgaacactatgatttagacaaaaaaccaattatatttacaattgaaaaaagccaaaaagatattgctaccgttactatgaaaaatagtttaacaaaaggcggcgtggaactttctaaagtggatgacgtcgatggcactactcttgaaggcgcagtatttaaaattgtggatatgaatggcactgtaattcgcaaagatcttgttacgaatcaacaaggtaaaattagcgtttctgacctacgtcctggtgattatcaattcatcgagacaacggctccgaaacactatgatttaaacaaagagccaattccattcacaatcacaaagagccaagctgatcctatctccgttacagctacaaatagcttaacgaaaggcactgtggaactttctaaagtagatgatgtagatggtactgctcttaaaggtgcgatatttaaaattactgatatgaatggtaacgacattggcactgagcttacaacagatgtacatggaaaaatttctgtttctgatttacgtcctggggactatcagtttattgaaacgaaagctcctgaacactataaattagatagtacacctattaagtttacaattaagaaaagccaaaaagaaaagctccaagttactgctacaaatagcttaactgagggtgctgtagaattaataaaagtggatgatataaatccagatacaaaactttctgatgcagtgtttaacatcatcgatgcgaaaggtaaaattgttcgcactgatttaactactgataaagatgggaagatttcagtttctgatttacgtccgggagattatcagttcattgaaacgaaagctccaactggctatgatttaaacgttaaaccaattcctttcacaattacgaaaggacaatctcaggttacctctgttacagccttaaatagtttaacaacaggttcaattgagttaactaaagttgatattgatcaccatggaacacttgaaggtgccattttcaatattttagaccaagatggaaaagtcatccgagaaggtttaaaaacagatcaacacggaaaagtaatcgtaaatgatttgaaacctggtaattatcaattagtagaaacaaaggctcctaaaggctatcaattagatgcatcaccaataaactttacaattgataaagcccaagctaagccactacaaattacagtttcaaataaaaaaattgaatcttcttcaggtggagatgacaagccaattactcctccaaataaagaagataacaaaggcaatgaaacatctgagaaacacgaaaacggaacttccgaagaaacatcgaataaaacagataacaaacagcaagatgatcgaaatacggataagcaccttccaaatacaggtcataaagaagaccctacacaaacagtaggtattgttcttctactagctggattattaagtattttagctacaaaacgcaaaaaaaattattaataattttttcacatccaatcaatctctcaattgattggatgtttttttatacaaaaaggacgatacataaagtatcgtccttttaacggggtgaggctgcccaaaagtacggaaaacctttgaacagcctcttattttcatatggatgccttacatatatcactgataataattatgaaatgcggaaacataattaccatcaactgattcaaacatgagaaatgaaaccctacagtggttccattcctctacataatctaaagtttgggtacactagattcatgcaatgtaggagctttcagagtagaaagcgaaccttcgtttaaaatgatagcatacatatctccctcaaaaatatgcaaatatgcatatatcgtttttttatttatcaatgtcagaatattgaaaaataaaaggtgtgaaggtaaaataaagtcattatccgtcttcttttgtcagtcagagagaatagaagaataggagaggaaaaaatgagaaaattattgaaacaaaaaatagtaagctctttgcttgctgtatcacttgctgttagcttagctccaattgggcaagcaaaagcggattccacgtcagaggttacacaaactccatctattacaaaacagattgatccaaaccgcgcgattgaacatgttcgtttcttatctgaaacaattggtcctcgccccggtggaacaaaatccgaagaatgggcttctcgttacattggtatgcagcttaaatcaatgggctatgacgtagaatatcaaccatttcaggtgcccgatcaatacgttggattcattgaatcacccctatcaacaaaacgtaattggcaagctggtgccgctcctaatgcactaatttctacagaagctgttacagctccccttatctttgttcaaggtgggacaaaattagaagatattccaaatgaagtaaacggtaaaattgttttatttgaaagaggaacgacagttaccgactataataaacaagttgaaaatgctgttagcaaaggtgcaaaaggtgttcttttatacagtttaattggcggacgcggaaattatggacaaaccttcaatccccacctaatgaaaaagcaatctatccctgtctttggtcttgcttatgcgcaaggaaatgcatttaaagaagaaatcgctaaaaaggggacaacaattctttccctaaaagcgagacatgaatctaaattaacatctctaaatgttatcgccaaaaagaaaccaaaaaagagtacaggtaatgaaaaagcagtcgttgtaagctcgcactatgatagtgttgtcggagcacctggcgcaaatgataatgcttctggaactggattagtattagaactagctcgtgcttttcaaaatgtagaaactgataaagaaattcgctttattacctttggttctgaagaaactggattacttggttcggattattacgtgaatagtctatcccaaaaagaacgcgaccgtattttaggtgtctttaacgccgacatggttgcaacaaattatgataaagcaaagaatttatatgctatgacatctgatggctctacaaactttgtaacagacgctgccttgcaagcaggtaaacaactaaataataacctcatcctacaaggtaaattcggttctagtgatcatgttccatttgctgaagctggtattcctgctgctctattcatttggatgggtgtcgatagttggaatccattaatctatcatattgagaaggtataccatacacctcaagataacgtattagaaaacatttcacctgaacgaatgagaatggcattagacgttatcggaacaggagtttataactcgcttcaaaaacctgttcctcaaactgaacagaaagctgcttaatcatttaaaagaccactgattttatgaactgaacccaaaaaattagacaaatatattaagcagctactaaggattgaactctgtattgcacaggggacaattttaccgctaacgcgattttccccatcatagaacctgctaaaaatccatatgcttcttttgacatcaacataataacaatcggcatagcaatgacgatgaagcaattctgtacaaaggcacgttgtgcttgcgacaaactagaacgcaatcttgccaggtatagcttttgtttttcgaaatcttctgcaatatctagtaagacttgcactgaatttgttccaccttctcggctacacacttccaacatttcatggaagaataccaattctctaaagttaaacgtttcattgaattctctaaatgcacgatgcattgtggttccaccttctaataaaagagaaactttttctatttcttcttgaatgctttcatgcatcattggtttcacctgaactaacacacgttttgcattgttgctaatttgaagtgcatttgctactgccttcatatagatagaaagacggtcaatgacaatcaagtagtaacatttttttcttcgataaagaagaaaccttggaactaaaaatccagataaaacagtaatcagtgtaaaaagatctctaccaaaggaaaaatagaatactgctgcaatactcattccggaaagaatcgtatatacccagtacatactttttgtcaatttccactcgtacttttgggcttcttggataacggattgtggcaaatacattcgtatccctttgatatttcttaattccaagcgcctttcttctttctcattttcttgaacaaattgagaaagagcagaacctttagattttgcaaaaagtaaaacgagcaatcctacactaataaagattaaaaatatacatccataggctaacaaactatgcatactgcacctccttttgtgaaaggaatggcgcataaagagctggatttacagtagaagaacggaatttcttctccatttcagctgacatttttgctgtaatgatatgatctccatgaatctttcctactctctcattcatttcatcgtattcctcacccgacagaataaattgagaaagctgattgaactgtatatcatctcgataatctaacaattcaatcatctctgtaatatagcgattcccatcatctttcttctctaaaaagacaatcacatcaaatgtctgtgaaattaattcatataaatactgagcatcaatattcgcaccactttgcagacacataagcattaaacgtctaaccgcttcttttgcacttcttgcatggacagaggtgaaaccaggatgtcctgtttgaaagaagttaatcatttttaacgcttctttccccctcgattctcctacaattaatcgctttggtccttgacgtaaagcatttgttaacaatctgtcaaaatcgattgcattttcttctacttccgatgccctacattgcatcggaacgaagtgatgttctggaaatatgcgatgtaaatagagttcggggttatcttctactacgagagtacgttctttcttcttcccatttggaatatgagaagcaagatacttcataaactctgactttcctgtacctgttgctccagcgactaaaatattcattttggctttcacagctgcagccaaaaagtgtaacatttctttcgatgcttgattggtagataacatacgttctttagaggcacggaggtgatctgcattcttacgaatcgttattgttgttcctagcccccctagctcatctagggctatattgattcttatatacggaaatacgcagtccacatacggctttgctgtatttaatgactctgatgtactgtttaccatcttataagctagggctttcacttcttcttctgtctcaaatcggtaaggaaatgtacattctccctctccgattttttcgtaaatgatttcttttgtgccattgatataaatatccgttacatccttatcttcttttaaaggttctataatcccaaatccaacaatttcatcacacaccatatttagtaactgttccgaaggtacatctgaaacgacgacttgattgcttagtaaaaagcctttaataatttgctccacagctgttctcttctctttattcataaaggattcgcttaagatatcacgatgttcttttactaaaaatgcacgaatttcatctgtaatatctttaatttgttgagctgtagttgttcctaactttcgaaccgatttagaacgaatcctataaccaaagtgatataagtccactcgatttcgctttaaggatacttgtttttcctgtaaatagccccacatactacttgccacctttttaatttcgtaaaccaaagagaccctttttcatagaggagtgctgggatggaatattaagaccagctacttccataatatgatggacctttgcattaatttgcggggaaccaaattgcattccccattcataactcgtacgatctctgtcatacggaattgtcaccgcaatgttttgggaagaaagcttttcaatatcttctacatagtcctcgtctcccatattcaaaacatgaatcatacgaggtaatgttagctttgcttcttctattagttgtaattctcttttaattgctaacgcaccacgagggttgccatttagcacatgaacaacaaggtctgattggtataggattgggtaactaagcacctcggataattcagttggtaccgataggatgatgtagtcatattctgtatctacaagtgattcgataaatgtcgttacaaacaattctttgttttgaatctctgggaattgagttaaactataacctgatggaaacaccagaaaatccatcttatcgtgtaatttttgcgtcaaccttggattcacttttttttctagtaaatcttgcttggtacaaatatactgcaagagattgtattcattttcttttcttacaagccctagcatatttttactctcatggctaagacctgttccaaccgcgaagtttggtcttacttggtccgcttctacataaagcacctttttccctaaatgagctaactcatttgccatcgcaatacttaacgtactttttcctacgttttcgtttgtcgcataaaaggcaaccattcttacttgccggtccatcttaaaagccccttccttatttggattcgttcagatactgtgcaacatattcttttacacttttagatatgggattggttgaatgcttctctacatagtctaaaatatttttctggtcagatatttgcgagaatccttctgctggttctaattctttccctgtttgttctaccttttgtccaactgcaacaggaattacatctccaagtgttttcgcacgatttagatattgaagttgttctggtgaaacagccaatgtatataatcgcgttacttttggcttttgttttccttcttgttcctcttttgattctttcttttctagtacaaatgcatcttctgtattgctatcctttgcagccgtaacacgtacacgttggaaaagaccaccgaatactaccttctcattgtccccgtccttcacaacctgcttaaaatataagtccacataagtgttaggaatgatactattacctgaacttgtttccaaatcaacaagtaacgggaatgcaacttctccatctttcaaatttaaaatagcagagtcaggtaactcctctttctttactactttatttttaaaaagatagctattttcggtgatgggctgcccatcatttgtccacttacctataacctcttttttacttacacgtaatgcatttggaggaatcccatcaccaggtaatgttcgttccactagcatttcttctttaatctctgtatgcgcaggtatatcctttgcagctacaacaacttttgttggttttactgcattttctactgcaaaatgattgtatccatagatacccgctactgttatagcagctaaacctaccgctgtaatctgcttcttgtgaaacttagacggcttcaatgtttatattcctccttatgtagcctttaaacgcaaaaaaggacacacctatggcgtaaaacgccttaggtgtgtccttttagctaatctaaagtctatatgaaaatgttggatttattttctctaatattacaatctcaatattatgatatatatagtttcatgtcaatcatttctaaaaaatatctgttttttctatttaaaaaccacgtaatcgataattaacctcgctccaaaaaccctgttataacaagatttctaacctattaagcatcccaaaaatatgttgtaattaatctaacacaactgaatattccaaggtgtcggttgctatcctttctctttcattttatggagaaaagaagagatcatttggaaatactgttcacaatagttgatgcaagaggcaaaattattattaaaacgaaatcaattttgttcctgtttcaaaatactttgcaggagcataacttttcccattccgatcctgaaattcacttccaatatataacgatgcaatcattacgataattccaatgaaaattacacgtttcatacgttgttttttctttttatccattcaatattcccctttctacaaaaaaaagacacatcccattaagggatgtgcctttggtttatccattcagctactagtttaagaaggatatcttattgtgttgattcatctaattatactatattttattctcatttcctatttctcatgtaataccaatctgttaatttataaagtacatcttccttaccaacccaattccaaccaactccacttcctccagggaatggatcgtcaggaaatactcttctttttatgaaatcatcatacgcaacacccttaatctctacttgctcagttaaacataaactcatttcattgatacctgctggagctgtttctacattaaaagtgtatacaccattttttgtcttcagtggtgaataccatttttggccaccatcaatgattttctcttgtccatcccaatataaagacttagttggtcttttactatcaaaaacatgtcctgttgcttcagataaatacatatttttaggtaggaatttcgctgtagtatctttaagttctttcttctctaaatcttgagtagactttaatccttcgtctgcaaatgggtattgtgccttagcagcagtaaatacaccagggtaattcgcattccaatcatttttgtacttaccgtttacttcatacgaaaatccataaccagaatgtagcttagaaggagctaaattaccaatactccctgtcaaagtttcataatacattgccccagttatatcttcttttgatacacgttcacttactgtttctactacaccttttacactcgttacaccacacattgccttttcttttgaaggctcatagattgctgttttaataggattatttttgtacgtagtttcctcgatgtctatacgattaccagcagggttaatttccgcttgaattgttcctttacctttatgttgccagtcaaggttcagggttttcttttctccctcagttaatcttaccttttgtaaagctacttgttgtccgttatgttttaacacaactactgtttcaggattcatatatttttcttctaatacatctaactttttaattttattcttctctttttctagtttctgtcttgcattatctagcttacttgctgcactatctaatttattttcttcccaagagcagtctctatcataatagtgatcctttccctcggcatctacttcatgaattggattgcgacgacaataacttaagctggattgtgcactatctctatcagattcagtgctgtttatttcttgctgtgacttattaatattgttgtttacttttgctctatattgatcacgctctagtttaaaattatcacgtgatacatctactcttgttttgatattctttccttctcttgctgtttctccttcaattcggtcagcagagaaatcaattttatatttaaagtcatcttcatcacctggatctgggttaggtgttacttcagtaccgcagttgccatcaatggtgaaatcaacagctttctcatttgattccctctgaacagcatctaggactttaattttcgcagtatattgcccacacaattgcggctgccaggttatatcttcttttttaaattgccctgcatctccttcatttggtttttggttatctttttgtggagttgaacgcagataattttcttggtgatacacggtttcaccatcttttgtaatatctaacatccatttaactcggttccgttctccagcagctttttgataagggtttactgttgttccattgggatctcggtcattgtatcctttatttttacttacatactcaaaacctttaaatgtaaatttaacaggtatatctttttttccactcatagcttgaaagtcttttacttgaggtttacttgtacgtacataccacaggctatatttatttatattacctacaccactagcaccagcgtatccaccagaaagatatgcaatgtcacgaatccaataaaactgtccaagttctctaaaactttcataagtttgtatcatatgtttatccatattttctaaaacgaattctgggtttccccaatatttactagaaataacagaattattaaccctttctacttcagtcaccatacggtcacccgctggtactttactatttaaataaccttcatttgcaattcgaatatacggctctgaagtatcttcagcttgtactaaattctcccttgggttatcccaattaaaagagccgttatatactgcaggaaagtgcacatcggccctgtataaagattctttagctgcatatccacttccaggtctataatattttcctggcaactgtaagttaagtgaagttaaaaacgaatcattttgaccgttatagaatgggacatcgttgtttttagcacttgccatacttggtatagcaagcatagttgaagtacaaataaatagtaaacctctttttaatttcatttctttctcctcccaaaacataaaaaaggacacacctgtaccattgggatggtacgtaaggtgtgtcctttacgtatgcttaattaaatattatattcatattttataatacttagtatatcattattttgtttcaatttgaatatacattgtatcaaaagctgcagtttgaccaatacggactttataattacctttttgataattgttaatagagtcttgcgcaatagtttcatcaatttcttgctctaaattcaatccacttaagaaggtaacccatcgtttagctaattctacagttgctggattattatctaaaaaatagattttataattactatttacagaaccttcaactgcgaattgtgcacctattgaaccagctggaagatacatatctttatccaaaatacgtactcctcctcttaaatctttatatttaagattcgtattgtactttttattaatatcttttactatattttgtgcttctgatgataattgtttttgcacactttcatttttcaaagcttcagggtggtaatcaaagtcaggttgtgcaatctcaacgtctaatccctcaggtactttaggctgttctggtttttcctctggttttgtttctggttttgtctctggttttgtctctggcttagtttctggttttgtctctggctttgtctctggcttagtttctggctttgtctctggttttgtctctggttttgtctctggctttgtctctggctttgtttctggttttgtctctggcttagtttctggctttgtttctggctttgtttctggctttgtctctggttttgtttctggctttgtctctggttttctttctggttttgtttctttttcaactgcattaatagagttgtataagaattggctatattgttcacgggttacatgtgtatatggtgagtacatattacctcctgtaccaatagtaacgccattttcttctaatgcactaattgcttttaatgcccatgagtttttatcaacatctgcaaattttgttgttttcgttgccttaaatttaaaagcatttgtaagcacttgtgccatttgttcacgagttaaaatatcatctggaccatacttcccatcaccaaatccatttacaagtcctgctttagcaagtgctaagatttctttttcaaacaaatgtcctttaatatcagtaaacggatttttgaagctagcatctgcatctgctggttttacgtacatataaatcatacgagcaacttgcccacgagttacattatcaccaaagccaaagatattatttccgtacccttgcactactttacgatttgttaaatcataaattgcttttgtagaccagtgatttgctggaacatcattgaattttaatgagtctgtgttatcagccttagcagtaaatgctcctgctcctagtaatgatgtacccataattgttagtgctgttgctgtttttaaaaatttgttagccattgtttgttcctccaaatatattagtttttcatagattcttttattgtacctaatttaaacataaaatccagataatttaacatataaattaattaattaacattttttataacttctgtctatataggtatattttcctgacaaaaaaactatacttttcagcatagtcttttatagtacaaatcttagaattttcattacttaaaatatacttgtcccaatccctctttactcgcccatatcggagcttttatgccatctacaccaatcaacttaaatatgaagaaatggtgttctgctttcaccttaaaagaaagggattgattatgatcgatgcgtccctttgtatactcatacttccatccatccatcttttcttctttcattcttttctctatcccagggactaaatccaccctttttccattgtaatcatattgaaatccacccttattttctgcgttttctaccatatcagcagcaaagttatgtgctttcactaactgtattccgtacaaaacgccttcgggtaaaaggctaattaataataaagaaaaggtaaggaatagagccgtagttactgtattttgcatttttaatgcacctactctttttctttattttacgtttccacctatttgtttttcttttccattcgcatcataaataataatacttctcgctttactctttatcgtttcttttttttcatcaaattgcttaaaataactagcagcttctgcatcactttcgacagcaatcattgctggtttttcctgtacatcatgtacagtgaagttacgttttgaagcgggatctttaaaatccgcattaccgttatacgccttttcaaactcttgtttcgctttttctggatcaatagctatttcttcttctgcacgcagagtacctacttttacagacttagccacagctatctcacctcccctttctaaagacgatttattatcagtatgtgttgtatctccaatcaccatatcagttacaaaggatagacaacctacaaataacagcaacatacttgctgcaacaataaacttttgcattcctcttcagcctccttaactttcagactttcgaaatcgaaatccacttaaaatggaactttttttggaattcaacaattgatttggtagcaataactctgctatttccttcattattccttctaactctttataatagttgcgacttgatagtaacgtactactattcaattgtgactcaaacacatcttctatttcatatggtggtaaagcagttaataccttatctccaaagcattcttctactatttcatgctttaaaagtacaggagaaaacttattcccaatgatcctcactttctctaaacctaagtaagaaacgagctttctctctttttgtgtaagaggatgcgctatctttagcaattgatgcagatctggttccgctacaaagaatatgtaatccgccatttcacatatctcatggtataaatctttatcccaatcgcttcctgcatcaataatagatataggtgcttcctggttggccaataaaaccttaataaaatggtcgaagtcctgctctgtttcgtttttcagctcttggtcaactataggattctttacaatatagtttattcttccttgcttccattttggaattaataatatatcagattccttctgtagcatctctttatatcgctgcaacataaattcactacgatagttttctggcgcttctgtatatccctttaataacggatacgtataaccatcatcatatagattctctatataattcacatcaatctgtagttcatttaagtaagcggctaaaagatgtgaaacaaatgtggcaccacttctcctgttcatgctggccacaacaattgttcgtcttggaatagcaataccaatttgtttctcatatactggctcaaaagccaatttatactgtttttttataattggcgcttttgacgtttcttcctgaatagacttacgcttttgtttgtttttaaataattttaaattagagtgtgattcactgttgttaccttcctctaattcacttgatactttcgcttcttcctcatcaaaaggcacttcaggcaatttcgtatgttgcggtgcttgacttgctcctacaatttccaccacatttttaatatccgattcctgtagcagctgtgggatgactttattatcaatatcaattttacgagagttaaaaatgtcatagatacctagataaatcagtttcgctaaaaattcatcattattttcacgctctgtaaatactacaatgcgaatatcccgctgaaagcgaatgtctcttaacttctgtaaaataattaattctcgcttatcttcgtgtcccgcatcaatatttaatcgtttgtcattaatacatagaatatcaggttgctccgtatctagaatttcatctaaatactttatgtgcatgacatcactatcagctacttcaaatcctgcaccaacaaaatcctcacgtaaatatgccgtatacacagtatcactaatagctaaaacaatctttttcattatgaaaaactcctctttgatagaaaatcactttaaagtaatagcatgttttcaaaaggcacttttgttgcgttttgtatttttgttaataattcggtgagaagtgattctatttcaaatccatccaaattacatggcatattatcaataaggttatatttgactctaacctctaaacgatcctctatttcttctaacggtatcgcactaaataaactttgttcatatataaatccatcccgaagatttttttgtatttctgtcttgtctttgtaaacaatggttacttgtgctaattcaataaaaggattatctaaagttaattttgtattccagtttagactccagatttcacagcggccgtccgcatgcacaacattagcagctacagatggagtaattgtaaataaacgatctactggaacatttgtaaaagtagttgtttttccttcaactactttcagtcctctttcctcacgttcatgctcaagcgaaatttccgcaccaaacaatgcaatttcacaaaatacttgttccattatgggtttaatgccttcatacgttcgaacagcaaatacactaaattcttgtgtttcatccgttcgaactaattcataaatgctaaattccgctgcatttacaattgcaaaaggaatatcttgtacaaaattaggatttataaatagagaatccggaatcactgtctctggatgtttgaaaaactctaaaccaagctgatatccttttagaaatgcattcttagcagcagctgggaataatgtttcaaatcttttgagattgcttttaaattgcttctcttcgacctcgttattaaattctctatcttgtaaaatgtttacacgatcagcaagcagtaaaaaatagtagttaataagagaattaattctctcctcaaaaacttgattatctttacaatatttatcaaatcttcttttactttcactaataatttcattcattctttaatactctccttatcattttctagttattaaataaaaaaagacacaccaatggcaggtatatgccctcggtgtgtccgtttagcaagaattaaatatctctcgatttgtatattaattttaaacaataaaacttatgtataagattatctatataatatctaaatgtcaatactacttcgcaattattaaataaactcacaaaaataatgcttctaattgattaaccttttcttttttgcatatgtcatttaataacctaattcaggtaatactattagtatatctaagtataggattttcataacaaaatttcgatttttttatttacaactaaatttcaaaagtaaaaaacattcatttaatatattccttaccttagagaactttaaatataaaacaatctttatattactcatagcataactaacagcaaacgactaaagcatattaatgttatgtaaacaataaagcgacacaaactcgttcggttgatattaacatatcaactgacattgacatgaaatttcatattgagagatgaatacaagttaaactaaccatccagttcatacctaagccaatttattaattacatatttcgcaaacaaaaattataaaattgcttttaagttcctattttagttattagacaaaaagcacgctaataatgaatatacatccataacatatttttcttgtaacaattaaaatgacttttagttagtatatacttatattagaatgatacacaaaatcatttcttctactcaaatactataaaaactacaatctataattatagattgtaaagatattagctgcactttttttatcatagaaaagaactcatacttatagtatgcccaaataaataagtcgtatacctaagtattacaactgctatttacaaccaaaactcccaatatgctacaccgttctttttataaacctccttgatcaagaaggtttcaaagaaagtctatctccatttaatttttaacacaatttgaagtacacaacccaaatttgttaatgtcatataaacaattaaccaacactaataccctcgaatgaaattaacatatcaattgacattgatatgaaaggaaataaaaatgtacagatgttaatttcatatcgatattttatgtgttatatcaatccgatgatactcagatataaattaacgtaaaaccaattagtagatctacatttattatcattagttactggaatgtaataactaacaaaccagcgcatgctatattttattactaattacttttattaactttttaatgggtatctaagtcataaacacccattagaataactaatatctctaaatgtaaatggcagtttctatttctgatcaacatgacattaacaattaggatgatttatcttttgtttggatgttttttgttaatgtcatattaatctcatagaaatccctcatttcatgtcaatgttatctttatggatattcgaagtatgcttatctaattttcgttaacatatcaatctcattgtcttatttatgaacttattaatatatgcaaacgcacactagaaatcggatatctacaaaatacatcacttggattattctagtattctgagtcgaaccttagtatcttaaaaacttcctcaaaattatctataaaatccttcgtttatggttcacatttcatgttaaaaggtaatctttttagatcaacatgtatacaaagggttgatctatatctattatagttaacaaaacattaacaataggtgttcgtatgttattagtaggtggttttagtgtcggtttcatgtcaatgtcatgtttcatgttaatgtcaactcgcgggctcaatctgttctttaatgctgataaagatcattttgttgatactgactacataaatttctatcacgacatgcaatatacaacttaaattgtacattctacactaaattaatatacataagtagatcctaacttgtatgtggcaagtaaatagggagtaggacgaacctcttcgaagtattatgattgtgctcctatatccttaaataccgttttgtttattgaacaatactaactctacattaatattatttactttttactagtttttatacgtgataattagattttgggcgttactttgtgtattttccgttatatacccggattatatccttataacttatttacaaaatagctttatttccttatcattaatattaagtagcctgatttgttaatctcatagcaactatcaatagcgctactgcaataatatatatattcccattaacaaaacattaccaattatatatttcaaattggtaataaagttactgattcaccgaattctatactaaacgttaatgttctgttaacaagtatatgtttacatgttaattctatatttcatgtaattcactggattggtagggatttttactaatattatcgaaatactagctaacatgttaatctcagctcacatgttaattataattagttatttatgagttgatttttgaggaggtagttacaatgattgagcaaaaaaatgaaaaacaagaccatcaaattaacgatgatgatatattagatgataatgttttcgaaaaagcatggcggataacagaattctcaaaactagtaggacgtcatcataatacagtttataattggttcaatatcctagaagaaaagggacttcatgaaactttaagaactcaaaatacaaatgaaaaactctataatgctttagatcttgaaattgctctatttataaagcagaaaagggatgagaaatggtctctagatgcaattattgaccttttaccacaccaatttgatttaagaccagtttcaccagaacatcaaacaaatgaggtatccactgaattaaaccttcaagctactgctgaaattattgaaaaaatggtaactaaacagttagaagaaaaaataaaacatattgaatctcattatgaagagagggtagaaagtatattaaagcaattaccacaaccagaagatgtagaaacgctaaaattgcgtcaacgccaagataggcttgataattttattattgagcatagggcacgtcaggaattaagaaaacaagcagagagcttatggaataataaacctgaggaagagcgcactagaaaagcaggctggtttaaaaaagaggaagacttgagtaaaaaacaactcttcatagagcagtacatacaagataatattattgagtatataaaatctcttatggattcagtggaataataaaaaagtctggaacttagtccagacttttttattattttgtagtaccaaacatcttatctggatctagaaaatctgctagatcttcatcttcatttgctccagcattattattttcttcgtcactacccatatcaataaaatctccaaatgcaaaacctaaatcctcatcctcatctatactttcaatcgtactaatttgagactttttatactgaatttggctttgtctttctttaaattcattaaattcttcaactaaacctttagataatctcgatggtaatgcatcggttttatagaaggtatatacagttcctaagaaatcattcttacttaccaaatatccattaaaaactgtaccatttataggtaaattatttgaaacttctaccttagcgtcatccataaaggaatcattaatattcttttgctcatctaggatagcaagcataccaaaatgatgtacttttgatgcttcaacagaaccatcatcgttcttcttcatcaaatcaatcgggggatggaaagagcttcctcttaatgattcttggaacatttctataattgcatggctattttctatttgattcatattacgtgaaaccttattaattactaaacagcccgttttctcaagtaaaatacgtttaaaatcttgagaatccagtattacagatgtaccagatccattagcagcggtatttaactcatgaataatttcactaatacgttgatttgcataatctcgtgaattagcaataccttttttctcattttcattcaattccttaaattcatcgtaaaaatgctggttatcagcaaacacaacaaatgctacaccttttgatttatcatttgctaatttccaaatttcctgtgaaaatttatttacttgtcgtaatacatcaggcccatctgctcggacgggaagagttacaacaatccccattttaataaagtctttgcgctcaatagcattttcaaaggctattctcgcaaacttcgcttgattcgccttgatttcagacattggatatagctgcgcaactttttgtaattcttgtctgattactggcttgttatgaaaagccgaaaattcttcaatagccttaatgattgtagaagttccagttcctccacctaaacctgcaaaaaataaaacaagttcatccgaaggtcttactcgttcagtaataaattcttttagcttttcttttgcttcctcatttgaatcaaggacttttactgcacgctcaggattcttacctaaaccacctaatttcagtgaaacttgattacttttgggtacattttttaattcagctagatctccatcattactatttagtgctaagcaattatatactgctgtaccatctgtatgtgtatattccgcaaatttatctaccattctagtaccagcttgaccaaaaccgaccatcgtcattttaactgccacttcattcttcaagaagttttttgccattattttatctctccttatttatcttttttcttttccctaactcaatcagtacttgttgccctctataagttgagatcaaaaatttatatgggtgcatggttttttcatagattaaagacattgatgatagtgtactcacacttatttcagctgaacgtctagatatattcgtacgttcaacctctaaagaataggattttcccttttttttctttactctcctatcaataactacattttccactatttcattaatagatatgcccctcatgtacttcgtctcttgaaattgtttatttactatgtttcctatgtatagaaatacactatagagtatctcatcttgttcaagtatatcagcaaacatgtttactacttcatctgcaaacttgattgtttgatatttttcacttaaaacttcgttcaagtcgtcccccccttaaaacactggttaattattcctagaaacatagtacatcattacacgtcgtatatcaagtcattataaataaaacttatatacaggacttgtatataagacttataaaattaaaaaaagaattaatatatattttataagggtttatgtatacgccttatatataatgcgtatacatgttatatcaatcttaaatttcatgtgattgacatttcaaaaaagattattaaaaaaaccaaatcgaaattctaaaaaacagattaaaaaccaccaatttttttagcataaaaattccagtaaatattatacaccttatatataagctttacatatgaagtgtatagtataatgcttttatatcgtagttaaatcgaaaaacaaattatctagtttacatacaaattttatataagactcttatataaaatttgtatgtaaaccgtatttgtaaagcttatataattcaactaaactttttaaatattccaataataaatattgttcgagtgtatttatattactagggagatttcaagacattcttatagcaattcacactaaggttttctttgttacctagctgttttaacgggatttatcacttataagaccgctcattgttaatgttatgttaatgtactgttcttcacttagtacttgttagttcacattattatatatgttataagaaaaattatcctcttttcctcatttgaattcaattccttgtcaatttcattcattcctcaaaagccagtagaagaggttgttaatttcatatgaacagcatcaataccctcaatattctacatattaaaaagggaggactaggataaatcaactttgacattctaaaagtagtaggctaacaatcacatctctactataaaaaagaaacatttgttcaaactagattattaaaaaggaaatctcatcttattaacatcaaagcgatacttacattacaataatttttttgtaatgcaggaggaatgatgatagcaattacaacctcacataaaattaacaactgttcaattttattatttcagttaagataactccttgtttaacgaagaaaaagtgaaggtaattcaagtgactaaaaccaatatgttaagtatctatagacatattgttaacttatttatgatttggtagaaacaattaatattatttgtctaagtgaatttatgattctatacaagaaaaaacataaaagaaaaagttggaattttagattgagcaaatagcagaagttgaaaagagcgtttcatcacaaataaaaagttgaatttcgaattaaggatagaaaaaattactctttattatcaataaacctttttataaatcttgaataattttaatcaattaaaatagtagtttggctatctaataaatgttaggacgtcataacattattttataaatagaatatcattataactattgttaggtatctagtagtagctcgtcctaacaaaacaaacgatttaataaagccttataaatcaataatttataagagatttataagagtagttttcatctcaacttcaacgtacaaaatgaagtatctctaaaaattaaaatgtcttatttattttttcgggttttacaaccaccacatcaatgtaatagtatattaaaaataataagtatttaatttagtttaattcaatataagaggtgtatgcattgtccgaaaaagtgtataaatatagaagatcaggtacccaaaaacattttcacttaaaagaagctgacatatttgtctttacagttttatattacaaaagagcacttacaacaaggcaaatcacgcagttatatagtgcatttgagggaagagactgttctgaagctagcatatttacaaagcttgaccgttactcacaatatggagctatgctaactaaaagaatagataaaagggctgatagtattacgaaacgcgctttattttccttaaaagaaaagacaattgaattcttattggaaataggaagaattccaaaaaaaagttcaaaaagacggtactcaagaacaacttctcttcacactatgtgttcacgtgaagtcatgatccgtacttttttagcgactacaaagaagacacaaaccaatgaattattatatgaattggatattcgttctttttaccagaaaaaaaatataaaaattgagggcaaccaattggccttgattcctgatgaacatatttcataccaagataaaaatatccatattgagatggacatgtgcaaagagacaaattctaccttagttgaaaaagtagagaagtacatagaatatgcaaaaaaaacaaatgaggatgtaacggttgtctttgttatgtacgacaaatcaatgttccttgctgaagatgcagaaccgccatacatacgtatgaaaaatctattattttctatgcggaagcatcatgaattattaatgaatataccaaatctaaatgtacacatttgctcattgaaagatgctggggatgttatttcagatatcattctaggaacagatgataatcaaaactgggaacaagatattctttttcctttatctcaacgtacagtaggagatgtcaattggcgttacacttttgtcgaaaaaattcaaacgtttaaagaatcaatagatggtggccttcgacgcacatacaagagagataaagcttctattcaagatttcttttttatttttggaaatgaaaatgattaccgaatgattgcaagattagatgatgtcgtgttttcaagaaggaatggagatgaaggcattccgcttgtagttatctatcctaaacgtgaaaatcctagagatattctactgatggacacttatgataatgtactacttctatccattcaaaatacaaatatagcaaccgatgaacagatcatggtacatgctgcaaataacgttaatccgaaaagacgtaaacttgtagaattatattaatcgtttattttttatatacttttatataactttattgatttttattatttaaggtgatagaataacgtttgaactaaacactcaaaactacaatcaaatcagaacatatgaaattaaggcaagcgacacacgctgtttttacagtgggtgtcgcttgcctttttttgtatggagaaaggtggaagtggaaaatgacaatgaacttacaatttgcaacaactactgggggagtgctctcagcaagagaagcatttaaaactccagaactagtccttaaacatattacagaagggggagctaaattttgcgtttccctacaagatatcaaaattccagggaaacctaattattattggtacgatgtaataattgaaactgcggcgaataacaaactagagataaatattgcagtactttctcaagaagaatataaccaattgtgtgaaggagatagtattgacttatatttaaaacaaactgaagatgcagcgaagttctttctaaaaaaatcaaaggaacaattcaagccagaacttcataatcgttttacattacaccataaagctcaactatgtctttaaaaagtaggtgaacccttatggagagatctaagcaaagattaccattatacactacaatcgccttaattagcggatttatcctttcatttggatttggtgtagcaaactacatccagttactctactatgcatttgaaccaccgtcttatcctatagaaattacatatgtaccactatttttaatgttcttctctttgctattaggagaatttagttttaggttctacagccgtatcccagctttacaatttcaaaatggcaagttattaattttaattgcttctcatattgcagtagatattcagtttttatggtttgcaactactcctatccatgcgaaagttattccttatcttatgaataaagcaaaacatgttaattttggtgaatatcaagcaataggggatgtattaacaggaaatttccatacactcaccatgatatttgtattcttaccgaccgtatttatgattttgtttactctttggtatagtggccatattatccgttacagagaagaaatcttaaagtgggtacaaaaatacgaatataaaaatcataagttgcaaaagtggtttaatagccaagaggaacaaatacatcctgatgttgatataggtcctcatattaagcacaaagaaatgattcgaatcaaggggaaagatagaaccctaaatggaattattattggtcctattggttctggtaagacatctagtttaattattccaatgattaatcaagatttacactggatggtacgttttataaataagtttgaaaatacgtataaaaagaataattatgatacagaagaagtaaaaggaacatttttaaatgggataactgttattgaaccgagtaatgatttatgtcaaaaggtatttaagttagtacaagcacacaagattcctgaaagttcaatttattatattgatcccacaaaccctgataccaaaaacattaatattttacgtggaccagttgataaagtagccgaggtttttgcaatggttatccagggtctgtcggaatctaataatgcattctttgaacaagcacaacggaaccaccttaagcaacatatttatttattaaaactacataacccacaaaaagatgtgacctttgatgacttaatagatatgtacgtgcgtgtaaatgtcaagataaacatgtacattttcgcttgtttaagcatgtacaaaatcaatcattttctttgctaaaatgagtcagtatggagaatccaattgaaaatgtacatatttattcaagcgttaatgtacatatttaagttagcatttatatgcgatatggagtttggaaaaagaagaagcttttttaagaaaaatgcatcaaaaaggatgggctttacaaaagtataatgtaatgtatacgtttaagaaaactgaaccaaaagatgtagtatataaagcggattttagactggattataaagattcaaaagaaaaacaaaaagaatatattgaaatatatgaaatgtgtggatggaaacatgtaacgagttttgcgaagtggaattatttttgtaaagaagtagacgtggaaaatgagttacctgatatttattcagacaaagaaacgaagatacaaaaatttgttgaattgatacagttcgttgcaattatgtttgtaatgttaattccagtgctttacttatgttttcttggagtatcagaatcaggattatataaaggtatggttgggtttttagtttgtatatatttatatgcgtttattaatttatttaggaagattaaaaagttgaaaaaggaaatattttaacaaagagtgatattcttagagaagattattgatgggaatcaacttctctaatttctatatatatttattttgttcattcttttttatataataaaagaccaactttttaattcatagaactaacagttacaaagataatataccataataccagtaacaacacctaaaaaaatcataaatgaagaagaaataatcaataataacgaactagcaattaatattaatttaatagatttttaatttttaaaatggtagtaaagtaaaagactataaatagtagaaacaaaccatattgttagaccgtaaggagtcgttattttctcccaatcgaagatccaaaagtaaaagatgactatatgacaagttaatagtagaaatattgatggaagcgttatttttttattatttgttttacctcgcttatgtaaacattcccaaaagagtgcgaagtttaacatataataaggaagaaatccatttttaattaacttattaaacgaaaaaatcccttatagaaaaatctatttctataagggataatcatgtttttattagaaagactgattttgagcaggtttaataaattgttctgggttttcaacaagcccacatacagcgcattggacgcgataagtaggtccttgataggccatatgaaaagcattcatcgtttcatttgtgtattcttcttctacttgaccagtttgtggatttaatttgactggttttacttgttgctcaagaatattaaagcgggtacggtttgttttacaacttggacatagcattggttccatatgtatacacctccatttgtatcatttcttaaaatctttaattttatgcaagcaaaaaactttctcaatataaataggtgtttaatgtatttaaaattcagaaaaaataaaatataataaaagtacgaactggttatgtccaaaccaaatctcctgttttatgccaataagctggggggccgagaaatcggcctcatttttttgtgctcgttactataagaaacaaggtttttatgagacatttgtcgaaattttagggatggatataaagggggatgtaaaatgaatttaaaaatgaagtacatcattttatatgtagaaaagtttgaggcatgtttaaggttctataaagatattttacagttacctataaaagcagagcacggaacatatattgaatttaatactggaactaccattttagcgatgaatacgcggcaagatgtgaaagaattaacaggactaccgcttacagaaggtgaattacagtcttctcatttcgaattaggattcgttgttgagaatgtacaagaaacgattgagcaatttagagagcaaggtattaaaattttagtggagccaattgtgaaaccgtggggacaaacaattgcctacattgccgatccagatgggaattatattgaaatttgcagttcattagaataaaaggagaaaaagagatggggtttccgagactagaaacagaacgtttacaattaagagaactaacactgttagatgcagaaacaatgttccgttatttttcaaaagaatctgttatacgttatttcggaatggattctttcgaaaatatcgagcaagcgaaaacaacgattcaaacgtttaaaaatcgttatgaagagggcagtgtatttcgctggggaatcgagaaaaaagggacgggccaattaatcggaacgtgcggatttcatttaattaataatcatcataaacgagctgaaattggttatgaattagacgatacatattggggacaaggatatgcatcggaagcgttacaggcaattttaacttacgggtttgaaacattgcaacttattagagttgctgctgttgtatatgtagaaaataaagcttctcaaaaattattaagtaaagcaggatttcaagaagaaggattacttcgaaaacatatgattcaaaatggagttgctcatgatactattttatattctttattaaaagaagagtggaagaagtaatgagtacaaacgaacttataacgattatgaagaagcatagggaaaatagattcattttaggtatagatggtttaagtcgatctggaaaaacaacatttgtagccaatttaaaagaaaatatgaaacaagaaggcattccgtttcatattttccatattgatgatcatatagtggagcgtaataaacgatatcatactggatatgaagaatggtacgagtattattatttacaatgggacattgaatggttaaggcagaaattttttcaaaagctacaacatgaaacaaaattgaaattacctttctttcacgaagaaacagatatatgtgaaatggaaaaagtacagattcctattgtaggcgtaattgttattgaaggagtttttctgcagcgaaaagaatggagagatttctttcattatatggtctatttggactgtccaagagagacaaggtttctacgtgagagtgaggagacacagaagaacctttcaaagtttgaaaataggtattggaaagcagaggattattacttagaaacggaattgccgagggatagggcggatttagtcatccaatgatttgaaaatagaaggtgaatagaatgaatattttatgggattttgatgggacgttatttgatacgtatcctgcatatacaataatgctttctgaaatattaggtgactcagtagaaaaacaagaaatatacaaaaacttaaaaatatcatactctcatgcaattcagtattataatatttcatgcgagcaggaagaaaagattaaagttttgaagggaaaattcacgccaaaagatatgaaaccttttgcaggtgtcgaagaggttttgaaatttgcagataaaaatgtgattatgacccataaacatagggcaggagttatggacattttaaaatattacggctgggaaaaatactttgtagatatggttacaattgacgatggctttccccgaaagcccaactctttagcttataatcatttacataaaaagcataatattgatttagctattggagatagagaattagatttattacctgcaaaagaattaggtatttcaacatgtatgtttcaaggtaattgtgatgtagcggattattctttatcacattactcggagttttttaagatagtgagtgatagagagttttctttataaaaaaagttattaataaagactgaatcttttattttaaaggtacagtctttattttttagaactctttcattttattccgtaataacgggcagcctgattgcttcaactaataatcagtggagggtgaacaaaacctccactgattaaagtttcactttattttctgtatataataattactagagattaaaggataatcgtccatctttattaaggaagtggccagtttattttaactaaattatggttattcatgttaatatgcactcatagctatatagaaggggtggggttagtatgaaaactgaaatagttcctaaaaagaagtacagtataataagctatgtatctttactcatcggcattctgtgttttctattcgtttttataacgccaacaaggatagccaatgcaggtaatatagttggggattatattacaattgcccttacaggtgtaggtatcatgctttcaataatcacaatgacgaaaagaacagagaagaagggaattgctattctttcattaatactgtcctcatcattttttatattttggatcatagcaattatcctattgtttactggccaaattagttttgcgccgtaatgtgtaataaaaagagtccttctcgtatgaaggactctttttactcggtatcttcaggttgatattctaaaatatcccccggttggcattctaatgctttacatattgcttctaaagttgaaaaacggactgcttttgcttttccatttttcaagatagaaaggttagccattgtaattccaaccttctccgaaagttctgttacactcatttttctttttgctaacattacatcaatattaataataattgccatattattcacctcagaccgttaaatcattttctgattttatatctatagcatcttttaatagtctttggagaacggcagcaaagaccgcgattaccattgaagcaaaaatcataatcatcccgataataataatgccaggggcgtcatctctctctgccacgagatagaaaagtagcatacctaatacatataatacactaattgccaatgcgctgtacttaatattttttaaagcttgaacagatagctctgagaatgcgttatttttatcaatatagtttaaaagcttaaatgtttggtacagtgcgaagtaataaggtattgctgttgcgtataaattgataaatacaagatatttaatatatgcaatatctggatataattctgcggcgaaatttcctattttagggactaaaaaaatgcacatagcaagaacggggattccgatcagaattacaacggtctttaaaaagagtgtggatccttgtttcataaaaagcacctcatttatttaatatcttattaatttaacatgaaatttattgtttaacaataaatttttatttcttttaatcgaggatttattgttaaacaagtaattaatgaaaaggatgttaaatcttttttataagataaatgatacatatcgatatttaattaaagaaagagaaagtaactattgttagctttatgagaattgggaactaataaaacatatgtaggttttggtatggaaaaggaaataaggtgtattgaaatgaatgcaaagtttatggaggaacaatcatgttgaattatggtgtgaagatgaaaaagttactattagtgggagctataatagtaagcgtattaagtacggaaagtatgatgaattatcattcggccaaagctaaggtgaaaaaagtagaacaccagcctaaaaatataattatgatggttatggacggaacgagttcaacggcgacaacattggctcgctggtataaaggggcaccgcttacgttagatcaaattgtaacaggaggtgttcgtacgttttcggcggaatcagctattacagactcggcgccagcagcaacagctttagcaactggaaataaatcgaattcaggatatgtaggtgtattaccttctattgtaagttcgcctagcttacagccaataaaagaagaagacaagttacggccggtcgcaaacgtattagaaggcgcaaaacgtactggtcgtgcaactggcattgttgctacatctgaaattcagcatgctactccggccggattctccgctcaccatgtcaatcgcaaacattttgacgtaattgcgaagcaacaagtgtatcaaaatatagatgttgtattaggtgggggaaaagcggcactgctacctataaaaagtaatgggatccgaaaagatggtgaagatttagtaaaggtgattcaaaacaaaggatacgactttgttgaaacgaaagatgcgttattgaactccaaatctaataaaatttggggctctttctcacatcatgctcttgcgtttgatatggatcgtatagcaacaaatccagaacaaccaacactttctcaaatgacagaaaaagcaattcaaacattatcaaaagataaagatggcttctttttattcgtagaaggtagtaagcctgattgggcagctcatgctaatgatccaattgggatgattagtgatgtattggcatttgatgaagcggtagcaaaggcgttacaatttgcgaagaaagatggggatacgatgctcatcgctttaactgatcatggtaacagcggcatctctatagggaataggaatacgaaaaaaggatacaatactacaccggtttctgcatacattgatccattgaaaaaggcgaaaatgacacttgaaggaactataaataaactgaaatctgatttatcaaatgtagaagatgtagctaaactatacggtttggataatctaactcatgatgaaaaagaaaaattaaaagtggcaaaaaagaaaatggatgtaggacgaattcttactacattattggctaatcgtgcaaatatcggctttacgacaggaggacatacaggtgaggatgtattcttacattcttatggacctcaaaaaccagaaggcttaatccaaaatacagacattgcgaagacgatggcgaaagcgatgggctttaacttagaagaagtaacgaataaaatatttttagagagtgaacaagcctttaagaaaatcggtgcaactgtaacagccaacaaaaccgaaggagcaaacccgttactcgtagtaaaacataataaagtagaagcacaattatttggtaacaaaaatataattcgtatcaatggtaaagggtatgaattaagaagtattattgtagagagtaatggaaagtgctatgtaccagaagaagcaattcaactatttgtaaagcattctcgttaaaaaattgccaaccagttaagctaactggtggcaattttttgtgtttattctaaatataagtgttcgaattgttttgtaaagttttccatatgagacttgtataaatgttaaagggaaattatatttttttcttacattaaaaaatttcgttttgtagaataagaagttatacatatagtaaagtctaatgtgttatcaattaatatttacgaaaaatatattaatactttagaatttctttaatgttcattattttttatttaaggttatccgttatatttataatatgtttatttcaatttattgtattgaagctcagttttatataattataaagcaatcatcaaaataaaatctccactagagtaaatttattatttttttgcggaaattattatgcagctaagaaaactgtaatttattgaattagaaatatattagaatttagttgaagaaagagagagggaataaaatgaatatagtgcacttacgtcctaaacagcggtctaagtatcgcattatgctagggaagtggtattactctacaaagaggtacattcagtggttagcagacggaaaaacatatgcaaaaaggtttcaacaagaaaagctaccttgtacagcaattcagcaccgaacgatattacttcgtaagctcaaagatgtagatatgtggtatcaacagaataaggttgttaatttgaaaattgctgttaaaaaactaaatggtatcgtcattagaccgggagaaacattttcttactggcgtttaataggtaagccaacgaggaaaaaagggtatgtagaaggtatggtattacattacggatcttttcaaacaggtattggaggaggtctttgtcagctttcgaatttaatatattggatgactttacatacaccactgacagtaacagaacgatatcgtcatagctttgatgtctttcctgactctaggcgcactcaaccgtttgggagtggggcgacttgttcctataactatttggatttacaaattaaaaatgaaacggaccaaccgtatcaacttcacctttatatgacagatgaacatttagttggtgaatggagaacagtctatccgcaactttatcaatatgaagtgtatgagaaagaacactcaattcaacctgcatactggggcggttatatacgacataatgtgattcaacgtaaagtatataatcaacagaaacagttaatagaagatcaatatgtaacagagaatcacgctataatgatgtacgaaccactattagcttgtaataatgagaatagtgagtaatatggtaatccatagattaaatagtatagaaaatatttaattcttatttttattaaaaaagcatgaatcccagatttactgggttttgattgtaactaagaacatataaaagttcactgttatttataggagagtctgtttgtttttatatcttatgtatttcaccctgcataaaaaaatatttctcaacattttatttgttgaaaaatattgaatattcgtattataacgaatattatgttgttatcggcaaaaaacgataatttgcagacactggggaggaaatacattgaaaaagaaaaagaaattaaaaccattagcggtattaacaacagcagcagtactaagtagtacgtttgcttttggaggtcacgcagcgtatgctgagacaccaacatcatctctaccaatagatgagcacttaataccggaggagcgtttggctgaagcgctaaaacaacggggggtaattgatcaatctgcatcacaagctgagacttcaaaggctgtcgaaaaatatgttgagaaaaagaaaggggaaaaccctgggaaagaaatcttaacaggagatagtcttacgcaagaagcctctgactttatgaaaaaagtaaaagatgcaaaaatgagggaaaatgaacaggcgcagcagcctgaagtaggcccagtagctggacaaggtgcagcattgaaccctgggaaattaaatggaaaagtacctactacatcagcgaagcaagaagaatacaatggagctgttcgaaaagataaagtacttgttttacttgtagaatttagcgattttaaacataacaatattgatcaagagccaggatacatgtattctaaggactttaatcgtgaacattatcaaaaaatgttatttggtgatgaaccatttactttatttgatggatcgaagattaacacatttaagcaatattatgaagaacaatctggtggtagctatacagttgatgggactgtaacagaatggcttactgttccaggaaaagcatcagattatggtgctgatgcgggtactggtcatgataacaagggacctttaggaccaaaagatcttgtgaaagaagcattaaaagcagcggtagcaaaagggataaatttagcagactttgatcaatatgatcagtacgatcaaaatggtaatggaaataaaaacgagccagacggcattattgatcatttaatggttgtacatgctggtgttggtcaagaagctggcggcggtaaattgaaagatgatgcgatttggtcacatcgttcaaaattaggttcaaaaccatatgcaattgatggcacgaaatcttctgtttcgaactggggcggaaagatggctgcatatgattatacaatcgagcctgaagacggagcagttggtgtgtttgcacatgagtatggccatgatttaggcttaccagatgaatatgatacaaagtactcaggacaaggtgaacctgttgagtcatggtctattatgagtggtggtagctgggctggaaaaattgcaggaacagagccaacgagtttctcgccacaaaataaagagtttttccaaaagaatatgaaggggaactgggcgaatattcttgaagtagattatgacaaacttagcaaaggaatcggtgttgcaacatatgtagatcaaagtactacaaaatctaaacgacctggaattgttcgtgttaacttgccggacaaagatataaaaaatatcgaatcagcgtttggtaagaagttctattacagtacaaaaggaaatgacattcatacaacacttgagacaccagtatttgacttaacaaatgcaaaggatgctaagttcgattataaggcattttacgaacttgaagcgaagtatgatttccttgacgtatatgcgattgcagaagatggaacgaagacacgcattgatagaatgggcgaaaaagatataaaaggcggcgcggatacaactgatggtaagtgggttgataaatcatacgatttaagccaattcaaaggaaaaaaagtaaaactgcaatttgagtacttaacagatattgcagtagcttataaaggatttgcgttagataatgcagccttaactgtagatggaaaagttgttttctctgatgatgcagaaggtcagcctgcaatgacgttaaaaggctttactgtgtctaacggatttgaacagaaaaaacataattactatgtagagtggagaaattacgctggttctgacactgcgttacaatatgcacgtggcccagtatttaatacaggaatggttgtatggtatgcggatcaaagctttacagataactgggtaggcgttcatccaggtgaagggttcttaggagtagtagattctcatccagaggcaattgtagggacattaaacggacaacctactgtgaagagcagtacgcgttatcaaattgccgatgcggcattctcatttgatcaaacaccagcatggaaagtaaattcaccaacacgcggtatctttgattataaaggattaccaggagtggcaaaatttgatgattctaagcaatacatcaacagcgttattcctgatgcaggacgtaagttaccgaagctaggactgaagtttgaagtggtaggccaagctgaagacaagtctgcaggtgcagtttggcttcatcgataaaataaggtaaaaagaagagaagctgcgataagtcggtgaaactgactgattgcagcttttttcttcttgtgaaaaaactcgctgttttttatgtacttattggaaaaatatgaagtttctttgatacataaaatgctccgtctgtccaattatagaagctattttggacgtaagaaatttgtaagtaatgagtaagaaaaaagagattttcatagtataaaatatttattatagctacttttaacacctgctactaatagtgtgctataatatgaattagcaacaaaaaggaaaggaattagaacaatgaccttagaaaatactaaaaatttaaaaaaacaagttgctccttttgaaaaatcaatgattaaaaaaagtgtttggcaactgatcaacacaatcgtgccatttattattttatggtaccttgcttataaaagtttgtcagtttcttattggttaacattagttccagcactgttagccgctggatttatgacaaggattttcattatttttcatgattgtacccattattcattctttaaaagtcgacgtgcaaatagaatagttggaacgtgtatgggtgttttaacattattcccatttgatcagtgggggcatgagcattctattcaccacgctacgagtggtaatttggataagaggggtacaggggatatttggacgcttacagtagatgaatatgtagcagcaccatttagactccgtttagcatatcgtttatatcgcaatccattcgttatgtttgggttaggcccgatttatgttttcttgcttaaaaatagatttaaccgaaaaggtgctagaaaaaaagaacgtatgaacacttatttaacgaatattttaatcgttgctattgtaggaatgctttgctgggcaattggatggcaatcgtttcttttagtacatggttctatatttttaatagcaggttcaatagggatttggctgttttacgtacagcacacattcgaggattcttattttgaagaagataaagaatgggaatatgtgaaagcggcagtggaaggaagttctttttataaacttccaaaaattttgcaatttctaacgggtaatattggatttcatcatgttcaccatttaagtccaagagtacctaactataaactagaagaggcacacaacaatacccttcctttaaaaaatgtaccaacaattacgcttgctacaagcttgcgttcactccgtttccgtctttgggatgagaaaagtaacaattttgttagctttaaagatgtcaaaaatataattaaaaataatgtttctgttcgggtgaaatctgaactataattgcatcgtatataaaattccccttaatcattttcgatttaaggggagtttttgtttaaagattagatgccagataagaagaaaaattaaatgtttcaaattgtaatggaagcagattaggaattgctagtacgtaagtacaaatacaagataacaataaatgcattatgttaacaagtggagttatcatgaattttccattacgataactgttcataaatccgacgaaaattaatagcaaaagggggatcgtacaacagtatatctaaaaaattagaaaagacttgaacggaaatttcattcatttttcttggtgttccgcattccatacacttaaataggatgcatattctaattcatctggattgtcatgtaacatagaaatgaattctaatttatttctatcacaatctagaaagtatacacttgcagcgggcatccacctttggacaattggctcttgatttccttttccttgacttcctatcacttctattccacgctcctctaaccacgctttagaagtcattaaaaactctaaatttacaccaaaagcaaaatgtctcagctcaaagtcttcgatattatttacttcccatagtccaagcatttgttttttattttctccgacccaaaagaaagccactcttcttttggagagttttcttgctaaggttaatcctagcttgttttgatagaaatttatcgctttttctaaatttcttacatgtaaatgagtttcgtatatgttctgtatcattatgatcattcctttctttcttgataactaccagttgagtaatgaatgtagttctaataatgtacagctatatctgatatacctatttattattatatcgaaattgaaatacgataaatccaactgaggtagcaagttcaaatgaaaattttactacttttgtaggagaagagaaaaatccattaaattcaggtgaactcatatttaaataataaaaaaagacaacacatgaagtgaaacgccacgtgttgtcttttttgtatcgtacaatattacgaagtttcgctaattttagtttcactttgagtgttagttgcaattcttttcttaactttaaagtgatagtaagtatagcaaaagatgataaatggtacagtacaataaatgcctagtctttgatctgggataaagataagacttactaatataatgccatacaatccaaaaccaagaattggtacaaggggatagagtggagttctgaacttcaagtcgtctaatttcccaccttcagctaaatagtgtttgcggaaaaagaattgagaaacacaaattgacatccaaacaataattgttatgactccagaaatggaaattaaccataagtaaaccgtttcagcagctacgacgcttgttaaaagagaaaaagcagaaatagctattgtcatgattaaagcgttgagaggaatcccacgtgatgataatttctttaaaaatgctggagccatttcgttttttgataaagaccaaagcattcgagtagcagcgtatagtcctgagtttgcaacagaaagaacagcagtaagaataacaaagttcataatatcagctgcatatggaataccgatattatcaaaaacagcaacgaatgggctctttgtgagtcctgcttcttcccaaggaattaaagcaacaagaacaaagattgctaagacgaagaaaaacattgtgcgccatataatatttctaatagaacgaggtaaagtttttgctggatcttcactttcacctgctgcgattccgacaagctctgtaccttggaaggaataattgactgtaaccattgttaatagaatagctgcaagtccattcggaaataaaccaccatgatttacgaaatttgaaaggagtggagctggttcgtcgccttttaaatcaataaagccgaacatagcggcgccaccaagaattataaaagctataatggcagatacttttatacttgaaaaccaaaattctgtttctgcataactacgagcagataatgcgttaatagtaaagattgtaacgccaaatattaaacaccaagcccaaacaggaatatcaggaaaccagcgctgcattgtaataccggcagttgtaaattcaagaccggtcgtattcgcccagcttaaccaatacaaccatccgattgtaaagccagttgcaggattgatgaatttagtggcatattcctggaaagaacccgaaacaggcatggctacagcgagttcaccaagacatagcataacgaaatacattaataatccaccggccataaaggcaagtacggatccaccaggtccagcttgacttattataaagccagatccgttaaataaccccgttccaatcacaccaccgagtgcaatcatgaataagtgtctacttttcatcgtacgttttaattcattgtttgtattgtttacttgcgccattgttttcctcactttcgtagttgatagaataaagtttgatgtttttccgtattatggaatgtattccgtgatgtgaaatcttgttataattttcagataattaaaaagaaaagtcaatatttttttgtttgcgttttcaattcgttgttagtgatatatttttattgttagaaaattgaataaatatattgatttcatttcgaatgtttgctaaattgatagttaattaaacgtactaacatactacgagtaaagttgaggcgagttatggtacagtccattgatcgagcgataagtattattaaattattgaattctacaaatgaaaaagagtattgggctatttctgatatagctgatggaacacatctcccagttagtacagtacatagattacttaactctctaatggagcatgggttagttacacaaataccagagacaaaacagtacaaaattggaccaatgtggatggaaatagggttacgtcaattggagaaggtagactacagatcagttgcaagagaagtgatgaagcggttggcctttgaagtcgaagaaagtgtctatttaaatattccaaacggaacacattctattatcattgaaagaattgatagtcctttaaaaattcgagttatcgataatctaggggaacaaattccactttcaattggtgccgcaaataaaacgatgcttgccaatatgaaaacgaatgaaatggaacatattgtagaacatttactttcttcattaccagaacaaaagcaaattcttcttaatcaaataaagcaaataaaaaatgaaggatatgctgtcagttatggtgaaaaaacagaagggacagcttcagtagctgcacctattatcggatttaatcataaagtagtaggagcattaagtgttgggttaattagtcatcgtattaatgatgatcgactatcttttcttattagcaaggtaaaacaagcagctcatgaaatatcaataaaaatcggcagtacatcagaactataattttgatagctgtcgtcattttttattcatatactggaattcgttttcataatgcggaaaaatagggggatttatatgtcaaggtggcaatcaaaagaacaattgattcaattattaagcagtcttgttgaaattcctagtattacaggtacagaggctgaagtgatattgccagactttgttgtggagcaattatctgatttacagtacttcaaagaaaacccgcaccatgtgcaaaaaaatccgacgggggacggacgatattttgttacagcactagtaaagaaaagtgatagtacaaaaaatactgtaattctagtaagtcactttgatgttgtagatgtacaagattacggagtgtggaaagaagatgcatttaatcctaaaaagttaacatctatgttttattctcataaagatgaacttccagaccatgtacgtgaagatatagaacatggagattggctgtttggtagaggaacaatggacatgaaatgcggcctcgcattacaaatggcaatgattgaacaagcatgtgaaggaagattcgatgggaatgttcttttattggctgtaccagatgaagaagtgaattctgtagggatgagggccgctgttccgagactattagatttagcaagagagcataatttagattataaaacggtcttaaactcagagcctatgttttcaagacatcctggtgaccaaaataagtatatttacactggctctattggtaaagtgttacctggttttctttgctacggaaaagagacacatgtaggtgaaccttttgcagggttaaatgggagttatatggcttcattaataacagcagaactagagttaaacacagacctttgtgatattgtagaaggggaagcgagtcctccaccaactaacttacttcaaagggacttaaaagaggattattctgtacaaattccgcatcgtgcagtcacattatttaatttgtttttattagaaaaatcaatgacagatgtagtttcattgttacgtcaaaaagtaacgaaagtagcagagaaaatagaagagtcgtatgaaaaacatgcatatcgtttttctaaatataatccatttataccacctaatctcaaagtaaatgtattaacttatgaagagcttatcacatatgcaattgagcaacatggacgagaaaaaatagatcatattcaatctaatattataaaaaatagaggagataaagatgatcgtgcggtaacgattgatttagtagataaattagcgattttatgtaaagaaaaggcaccgatgattgtacttttcttcgctccgccgtactatccagctgtgagttcacgcaacaatcctttaataaaagaggtagttgtagaaatggaaaagtatgcacattacaatcataaaattacatttgaaaaccaaaattattttggggggatttcagatttaagctatgtaggcttgcagtatccactggattcaatgagttcgcttgtagacaatatgccattatgggataaaggctattcaattccgcttcaggaattagaagagtttgatgttccagtattaaatatgggaccggtaggaaaagatgcacatcaatggacagaacgtctagatgtaaactacgcatttgaaacactattagatatgttaccgaaatgcattgaaaaattattagtttctaataaaattacacaatcatagtagggaataggtaagggataaaacagaacctttaaagaagagtcgaatcaaattattttaatataattaaaaagtagaacggccaagctcaattttatatgagtttggccgtttatcatgtagtgaatttttaattaaaattatgtgaattcatagctaacgtaatctcttttatagttttattttttagtttgaccagatagttcaacagacttttgcgtacaacgctgcatagctgaaataatcgctgttcgtaatcctttttcctctaatgttgctacagcttctattgtcgttccgccaggagaacaaaccatatctttcaattcacctggatgtattcctgtttctagtaccatttttgcagagcctaacacagcttgagcagcgaatttatatgcttgatttcttggcataccatctagtacagcagcatctgccatcgcttctataatcatatatacataagctggtgaagaaccacttacggatgtgacaacatccattaatttttcacttacgatctctgtttgaccaaaactattgaaaatgtttagtacatcttctaaatctttttctgtcaccatttcattagggcataatgcagacattccttctccaacaagagcaggagtattaggcattactcttacaacctttacttttttattaaaggcattttcagtactttcaatactttttccagcagcgatcgtaacgatgatagcatcgtttttgattacttcttttatttcattaattattgatgaatataggtctggtttgattgataaaattaaaatatcagcatttttagctactttattgttgtcggtagttgtagttagcccatatttttcactagcattttttaaattagcagtgtttaaatctgaacaaataatttgatttgaagatactatatttttgtttatcattccgccaatcatagccattcccatatttccgcaaccgatgaatccaatttgtttatccataataactcaatcttgctccttttataatcaattatatcggtttgatattattttcttagaataagaataacatccctgtgcaatataaagaaacattctaagagaatatattcctttttgcaacactaaaagacaaaaattaattatattcgacattatgtaaatatatacactataatgtaaggttttatgtttatgaatatgagttaaacttatatcattttgtattttcattcagtagggcgataatttcatacaaataacttgtggctctatttatttttaaaaatacctcttgacaccgaatcaaactatatcgcataatataaaaaaattagattgaaaatcgttgaagggaattagtacatatgtcttcttgcgaaagagagtggaattcaccggctgaaagattcctcgtatagaatatatcgaacctatccctgagtcttaaatgaaagtttaggcgttcgcctgcgttataggcaccaagtggatatctatgtatatcaattaaggtggtaccgcggaacaatgaccgtttcgtcctttttattttattaagggcgaagcggtcatttttattttgctcttaaatacttcagtgcagcattgatgagaatagatatagttacaaagtgaatgaagtgtaatttataaaaaaactttgattttagacttgggggataaaaaagtgaaaaaacaacgaattgttgtaaagattgggagtagttccttggcagatagtcatggaggcatctctacagaacagctttcagatcacgttgccgcattggctcggttgaaagaagatgggcacgaggttgtgttaattacatctggagccgtcgctgcaggtttttcagcgctaggatatcctagcagacctgtaacgattaaagggaaacaggctgcagcagctgtcggacaaagtttgttaatgcaggcgtacacggaggaattccgtaaatatggcatcgttactgcgcaacttttgctgacgagaagtgatttttctagaaaagaacaatatagtaatgcttacgctacgttaggagaattattaaaccgttccgctcttccaattattaatgaaaatgattccatctctttagaggagctaacgttcggtgataatgatatgctgtcagctttagtaagcgggcttgtttcggcggatatgcttatgatctttacggatgtgaacgggttatatgacaaaaatcctcagaaaaatgcggatgcaaaaaaatattattttcttcctgaagttacggaagaaatttcttctcttgcaggagatgcaggctcaaaacttgggactggcggtatgaaatcaaaaatcgatgctgcaaagacagcactctctcttggtgtgagtgtatttatcggaacaggacgtggacaggaaaagtttgtagatgttttgaagggtaagggtgatggaacgtatgttggtaatgctcctcaaaaagaaatgaagatgaacaagcaatggattgccttgcattcgcttgttagcggacaaattgaagtagatgctggggcagctactgccatcattcagcatgggaagagtttacttccagctggtgttacgaatgtatcaggatttttccaagtgggtgaagttgtagaggttgtaacgcaacaagggcgcgtaataggaaaaggacaatgcacatatagtgcagaggaactaagagatgtaaaaggtatgcaaagccaagatattcaagtaagaggcgagagacatagttatgaagtcatccatagggatcattgggtttcactttaaaaaggaggaaataaaaatgaatgaagtgttagcaaaggggataaaagcaaaagaggttgctagagaacttgtgcttaaaactacagatcaaaaaaatgaagcacttgctgcaattgctaatcagctgatagtagaaacagcttatattttagaagaaaacaaacgggatattgaagaaggtaaggagaaaggattttctcattcactccttgatcgccttttgctgaatgaacaacgaattgttgatatgacagagggtattaagcagttaattgaattacgtgatcctattggagaatgtgtaagtgcatgggaacgaccaaatggactatctattcaggagatgcgcgtaccacttggtgttgtcggaatgatttatgaggcaagaccgaatgtaactgttgatgctgctacaatttgtttaaaaacaggaaacgcagtaatactacgtggtagttcttctgctatacattctaacaaagctatcgttagcgttattcaccgggcgcttaagcaaactagcttgccttcagaaagtgtacagctcatagaagatacaacgagagatagtgcaaaacagttgtttacattgaacgagtacttggatgttcttataccaagaggcggtaaacaattaattgatacagtagtgagagaagcgtctgttccagtacttgaaacaggtgcgggaaattgtcatatattcattgatgaaacagcagataaacaaatggcgtttaatattattataaacgcaaaaacgcagcgtccatctgtatgtaatgcaattgagacgattgtacttcatgagaattgggcagagcaatatggtagcgagttgttttcttccttgaaggaaagaggagtggagctacgtggtgataataaagcagtggcgattgatccttctatcttacttgcgacagaagaagactgggaaactgagtttttatctctcacactagcagtgaaagtggtttccactgttgaagaagcgattcatcatataaatacgtatggatctatgcattctgaagcgattattactgaaaacgaggaaaacgtcagcaagttttttacttctgtagatgccgcggcactttatcataatgcatcgactcgttttacagatggatccgaatttggattcggagcggaaattggtatcagtacacaaaagttacacgtaagaggaccaatggggcttccagcattaacttctacaaaatatgtgattcgtggaaatgggcaaattcgaaaataataataaaagacactcaatttaatctgtaccctttgtaaaggacattttgaaaaaagttaggcaacatcaagaagatggtttctgtatccaacaggagtcatcttttttaaattccattgatatctataatgattataatacgtcatatatttctttttctagctagctttttagaaagaataacgttttttgacacttgggggtagtgcaaattcttaagttgatgggcatgtgttgttacccctaaaatagcaatttttatattggattcaatctgtttgattatataaggttttccgaaataaggtttctttatgtttttatctaaaatgtttgctgataggtacgggaagttcgcagtagtcacagcattatttaatatatccatcccgtaattaaattcatgattgccgataattgcagcgtcatactgtaagtaattcgctaataaggacattgggttttttttgtttttttcgtatgtaacataatgataagtaaatggtgttccttgaataaagtcgccattatcaattaaaagaacgtttgtattttgggaacgttctttttttataagagtagaaattttagctaaaccaagttctgctggggagttatcttggtagtgaataggataaacagtgccatgtatatcgcttgttaataagatgtttaaagttacagtttgattttgttccaatatgactcaccttttctattgttatcttccaattcatcatatcaaatatgtgaagagaattttaatgtgagtgtatagaatgtgtaaagattctgtaaataatcaattatttgtaaaaatatgtgatatatttcttcatgtttatgaaaggttattttataacaatgaaaaatggaggcattaatatgttgaaaaaagtttttgcaatgagcacaacagttgtactagcagcgggattattaagtggctgtggaacgaaggaatcaagcgcaagtaaaaatgaagatacgaaaaaagggtatgtaccgaagactttaaatgttcaatttgttccttctcaaaatgcagatacgttagaggcgaaggcaaaaccgcttgagaagctattaagtgataagttaaatattccagtaaaagttagtatttcaacgaactacaatacaattgtagaagcgatggcatctaaacaagtagatgtaggatttttaccgccgacagcgtacgtattagcacatgaaaagaaggctgcaaatgtaattttacaagcacaacgttttggagtagagaatgaaacaggagcccctacaaaagatttagtagattattataaatctgagtttgttgttaagaaagattcaaatattaatagtgtaaaagatttaaaaggtaaaaaaattggctatcaagatgtaacgtcatcagcgggatatgtgtggcctgcagctgttctattaaaagagggaattgatccgttaaaagatgtgaaacctgttacattaaaaggtcacgatcagtcgcttattgctcttttaaatggtgacgtagatgcggctgttgtattccaagatgctcgtaatattgtaaaaaaagattatccgaatatatttgatcaaacgaaaatagtgaaatttactgagaaaattccgaacgatacaatttctgtacgatctgatttagatgcagaatggagcaagaaattacaagatgctttcattgaaattggaaagaatgaggaaggccgtaaaatcattaaagaagtatattcacatgaaggatatgttaaatctgatgatagtaaatttgatatcgttcgtgaatatgggaagaaagtaaaaacgcaataatacatatggaaatggcagctagctgaaaggggatgttttcagttagtttgccgttttgaatacatagaaggtaggtaagatgtgtgatagagtttcgaaatgtctccaaagtgtatccaaacggtacaaaaggattgaataatataaacttgaaaattcaaaaaggtgagtttgttgtaatggtagggctgtctggagctggaaaatctacacttctcagatccgtaaatcgtcttcatgagattaccgaaggagaaatcattattgaaggtgagtctattactgctgcgaaaggaaaaggattaaggcgtatgcgccgggatatcggtatgatcttccaaagttttaaccttgtaaagcgatcaacagtattaaaaaatgtattagctggtcgtgttggatatcattccacattacgtacaacgttaggtttgtttccgaaagaagatgtggagctcgcatttcaagcgttaaaaagagtgaatattttagaaaaagcatatgcacgtgctgatgaattatcaggaggacaacagcaacgtgtatcaatagctagagcattggcacaagaagcaaaaatcatattggcagatgagcctgttgcatcgttagatccacttacgacaaagcaagtattaaatgatttgaaaaaaatcaatgaagattttggaattacaacaattgtgaatttgcattctattgatttagctaggcaatatgcgacacgtattattggattacatgcaggagaaattgtttttgatggttcagtagaagaggcgacagatgaaaaatttgctgaaatttatggagatgtagcacagaaaaatgaattgttagaggtggcagttaaatgagtgacgtaacgatatattcgaaatcgataccgaagccgccgagtaagttgaaacatatgttaacgtttattttagttattttaatgctgtggagtagtagtgtacaagtagatgcatcattttcaaaactggtagacggttttcccaatatggtagatctattgaaagagatggtgccacctgattggagttattttcaagttattacaacagcgatgttagatacaatacgtatggccattattgggacgaccttaggagcgattttagctattccacttgcactgtttgcagcaagtaatgtgtttactaacacatttttatacagtctagctcgaatgattttaaatttgatacgaacgataccagatttattattagcggcaattttcgtagcgatttttggaattgggccacttccaggtattttggctcttacttttttttcaattggacttgtagcgaaattgttgtatgagtcaattgaatcaattgatccaggtccgttagaggcgatgacagcggtaggagctaataaggtgcaatggattgtttatggggtaattccgcaagtgaaagcacattttgtctcctatgttctttatacatttgaggtgaacgtacgtgcagcagctgttttaggtttagtaggagcaggtggtattggactatattatgatcgtacacttggatttttacaatataaacaaactgcttctataattatttatacccttattgttgttttgttaattgactacattagtacattgttacgggagaaactataatgaatagaacgacgatgattgtgccaaaaccgaagaaaccgagtatatatcgctggattattttaatagcacttacagttgtatatgtatgggccttttcaggagtaccattagaagggataaaggacacagcaggtgaaatcacgaaagcaattatgacagggatattaaatccagactggtcgtatgtatctttgccagatggtgaagatttattacatggattaattgatacgttggcaattgcgatattaggtacatttatttctgcatttttatctgttccgtttgccttttgggcggcaacgaatatgagtattggaaaattaacttcaggatctgggaaatttgtgcttagttttgttcgtacgtttcctgaattagttatggctcttttatttataaaagctgttggtccaggctcttttgcaggagtattagccttaggattacattctattggaatgttaggaaaactatattcagaaggaattgaaaacatagataaaggaccgacggaagcgttactagcaacaggagcaaaccgttttcaaatactttggtatgcggtgttaccacaagtgttaccagattttctatcgtatacgttatacagatttgaaattaatgtacgatccgctgcgattttaggggttatcggagcaggagggattggtacacctttaatttttgcgctgagttcacggaattggtctcgtgttgggattattttattaggtattattttaatggtaattataattgatttgatttcaagctcgattcggaaacggattgtttaacttatttgaaaagcatcgaagttagatgctttttgtgtttttaaaaacgtattaaaaaaagtaagtatagaagaaatttgtataaatatacagataattccctttctttttaaaataaaaataatgaaaaagtatgtcatattgaatgcccatacattcccgggaacattgatttttttataaaaaaccaaaaaaatatcaacatatttgtcgatacatgttgtataatcttgcgtgggaagctatcatataaatgtataaaacgtttactaatataagcgaagggaagaatagcatgtcacattcaatcgaacaactttctatcaacacgattcgcacattatccatcgatgcgattgaaaaagcaaactctggtcacccaggaatgccaatgggtgcagcaccaatggcttatacattatggactcaatttatgaaacacaatccaaataacccaacgtggtttaaccgtgatcgtttcgtattatctgcaggtcatggttcaatgttattatacagcctacttcacctatctggttatgatgtaacaatggatgacttaaagaacttccgtcaatggggaagcaaaactccaggacatcctgagtacggtcatacagctggtgtagatgcaacgactggtccacttggacaaggtattgcaactgctgtaggtatggcaatggctgaaagacatttagctgctaaatataaccgtgatgcgtatagtgtagtagatcattatacatacgctatttgtggtgatggagatttaatggagggcgtttctgctgaagcatcttcattagctgctcatttacaattaggtcgtcttgttgtgctttatgattcaaacgatatttcattagatggcgatttaaatcgttcattctctgaaagtgtagaagatcgttacaaagcatacggatggcaagtaatccgtgttgaggatggaaacgatattgaagcaatcgcgaaagcaattgaagaagcgaaagctgacgaaaaacgcccaacgctaattgaagtaagaacgacaattggtttcggttctccaaacaaatcaggaaaatcagcttcacatggttctccacttggtgtagaagaaacgaaattaacgaaagaagcatatgcttggactgctgagcaagacttccacgtagcagaagaagtatatgacaacttccgtaaaacagtacaagatgttggtgaaactgcgcaagctgagtggaacacgatgctaggtgaatatgcacaagcatacccagaattagcaaacgaattccaagcagcaatgaacggtcaacttccagaaggttgggagcaaaacctaccaacttatgaattaggatcaaaagcagcaactcgtaattcttctggtgctgtaattaatgcaattgcagagtctgtaccatcattcttcggtggatctgctgaccttgctggttctaacaaaacatacatgaataacgaaaaagactttacaagagatgattacagcggtaaaaacatttggtacggtgtacgtgagttcgcaatgggtgcagcaatgaacggtattgcactacatggtggtttaaaaacttacggtggtacgttcttcgtattctctgattacttacgtccagcaattcgccttgcagcattaatgcaattgccagtaacgtatgtattcacacatgacagtatcgctgttggtgaagatggtccaacacatgaaccaatcgagcaattagcagcgcttcgtgcaatgccaaacgtttctgttatccgtcctgctgatggtaacgaatctgttgcagcttggagacttgctttagaatctacaaacaaaccaactgctttagtattaactcgtcaagaccttccaacattagaaggtgcaaaagatgatacgtatgaaaaagtagcaaaaggtgcatatgtagtttctgcaagcaagaaagaaacggctgatgtaatcttacttgcaactggatctgaagtaagcctagctgttgaagctcaaaaagcattagcagtagacggcgttgacgcagcggttgtcagcatgccatctatggatcgcttcgaagctcaaactgcagagtacaaagaatctgtattaccaaaagcagtaacaaaacgtttcgcaatcgaaatgggtgctacattcggatggcaccgttacgtaggtcttgaaggagatgtgttaggtatcgatacattcggtgcttctgctcctggtgagaagattatggaagagtatggatttactgtagagaacgttgttcgtaaagtaaaagaaatgctttaatgatttcagaaaaatctctccggcatggagaggtttttctatgtaaatgagttttttcgacagaaaaagttttttatctctccgcagtcagacaatcattgcaaattttcttatatataatgaagagaaaaggttgtccagattgggagtggaaaaatgaaaacgtatgaattgtatttaattcaagaggatattgcgaaagcttattttggtcgtgaatatttgttttttgatttatttgctcgattttcagaatctgggtccctttcggagaaaaaagtgttatataagcaaatgatgtatataacgatgccattgcaagtaatgaaaattcatcataaattagaacaagctttgcgcgttcttggtaaatatgatagaacacatcatacacatacactttatacgggagcggagtacggcgaaataatggtgaaaccgcactatattcgtatgaatacctctggaaatgtctctatggaaacaacattctttgaggtgttaagaaagtgtgaattaacatttttagctatggattatgaaaatacaaagtacggatggctgaatcctctaaaacaagtacgaacatatgtgtaaaaaatgtcgaattgtatcttgtcttattgaaaaggttttagtacactgtaaggtagacaacatgaaggaggaaaatatatgccaatttggttaggtattctagtgggcgtagtagcactagtagcaggcgtggcgttaggatttttcattgcccgcaaatatatgatgaattacttacaaaaaaatccaccaattaacgaacaaatgttaaaaatgatgatgatgcaaatgggacaaaaaccttcccaaaagaaaatcaatcaaatgatgagcgcaatgaacaagcaacaaatgaaataagcgctaaaagacactcgctaaaagacactcgctaagagtgtctttctttttgttagttatagtttttaaaacttttaaaaattctgtatttttggtaaactgaaaacatcgctcattttaagggaggaggaaaaaaatgaaagtgtttatgaatttagcgtggttttttaaacaagaaaaacgagcgtacataactggaattattttattgtttggcgttgcacttttagaacttgtagcaccaaaagtaattggaatcgttgtagatgaaattaatgatggaacattgacgaccgataagttactaaaatgggttgtactattagtaattgtaggcattacgatgtacatattacgttacatatggcgtattatgattttcgggtcttcattaaaattagctcgccaattacgaaaaaatttatatgaacattttacaaagatgagtccatctttctatcagtcaaatcgaacaggtgatttaatggcacatgcgaccaatgatattcaagcgatccagcaaactgctggagcaggtgttttgacgcttgttgactcattagctgtcggaggatgtgtactcgtagcgatgggttttacaattagctggaagttaacattattaagtttaattccaatgccgattgtagctatttcgacaaattattatggaactttattacataaaaggtttcataaagcacagcaatcgttttcggaaatcaatgataaagtgcaagagagtatgagtggaatgaaagtgattcgctcgcttggacaagagaaagaagatttgcaggcgtttcgaagaaaatcagaagatgttgtaaataaaaatgtgttagttgcacgtattgattcgttatttgatccgacaatctctcttatcgttggattttcttttttaatcgcagtatgttatggatcggtattagttgtaagaggtgaattaacagtaggtgatctcgttacatttacgacatatttaggtaccctcgtttggccaatgttagcgtttggatggttattcaatattatggagcgtgggcgtgcttcatatgaccgtgtagaaaaaattctttcacaaaaatcagatgtagtaaatagcgaaaaagctgtacagacaatagcgagcggtaatgtttcgtttgccgttgattcattttcgtataagaaaaatgaattgttacatttaaacgatattcactttgatttgaagaagggcgaaacgctaggagttgtaggacgtacaggcgcagggaaaacaactttattaaaatgtttaatccgtgagtatgatcattttaatggtgaattaaaaattggggagcgagatattcgagatataacacttcatggtgtccgttctgccatttcatacgtgccgcaagatcattttttattctcagcaagtattggtgagaatattgcctttggaaaggcggatgctacatataatgaaattacccaagctgcagagattgcttgtattcataatgacatcctccaattttcagaaggatatgaaacagtagtaggggaaagaggtgtttcgttatctggtggccaaaaacagcgaatctctattgctcgtgctttattaacaaatgctgaaattttaattttggatgattgtttatcagcagtagatgcaaaaacagaagagacgattttaagtgccttaaagagggaaagagcagggaaaacgacgattattactgcacaccgattaagtgcaattcagcatgccaatcttattcttgttgttgatgaaggtagaattgtacaaagaggtacacatgaggaattaatgaaggaaaacggctggtataaggaaatgtatgaaagccagcaattagaagctttagtcgagaaaggaggcgtatgatggtagagaagaagcgaagtgatttaagtagattgctttcctatatgaagccatataaagggttgctatctttagcatttatctttttagttggtgcgacagtaacggaaatgatgggtccttttttaattaaacaattcctcgatgaacacctagtaccgcgggattttgaacgatcagcgctcgttactttatttgtaatttacatagttgctcatttattaaaagtattatttacgtatttaaatctattgtactttcagaacattgcttttaagattgttcaagatatgcgagttgaagtatatgaacatgttcaaaagctgtcattaagtttctttgatcgtacgccgattggtacacttgtatcgcgtataacaaatgatacggaagcgattaaagatttttatgttagtgtattatcaacatttgtgaaaaatgtagtctttttagtaggtattttagtagcgatgtttttattagatgtaaaattagcgctattttctctcgtattaattccgataatgtttgcgattatggtattatatcgccggaaaagtgcagctttttatttagaagtacgtaatcaactaagcgtgttaaatgcaaagttgaacgagtccatacaaggaatgaatattgttcaagtgttcagacaagaaaaacgtatgagaaaagagtttgaagaagtgaataataaacattatagtgcagggcgacgtactttgaagttagacgcattacttttacgaccagctacggatttagtgcatattgtagctattgcgttagtactaggtttatttgggattgatgctttaaagagccctgttgaagtaggagttttatatgcttttgttaactatatacatcgtttcttccaacctgtaaatgagatgatgatgaaattgtcctttttccaacaggcacttgtttcgtcatcacgtgtatttcatttaatggacgagaaagatttagcaccggttcaaaaaggcaatgagaatcctcaagttgtggatggggatattgaatttaaaaatgttactttttcatatgatggaaagcgtgacgttttaaaaaatgtatcatttcacgtgaaacaagggcaaacggttgcttttgttgggcatactggtagcggaaaaagtacgattatgaatttgttaatgcgattttataatattaagtcaggaaatattgtaatagacggtgtagatttagaaaaatttgaagaacgagaaattagaaagaaaataggactcgtattgcaagatgcatttttatttgctggaaatgtaaagcaaaatattcgtatgtataatgaagaaattacggatgaagaagtaaaagaagctgctcgatttgtgcaagcaaatacgtttattgaaaagttaccaaaacagtatgaaacagaagtagtagaaagaggtgcagcattttcaagcggtcaacgacaattaattgcttttgctagaacgatagcaacgaatccgaaagtattagtattagatgaagcaacagctaatatcgatacagaaacagaagaggctattcaaacagcgttgcaacaaatgcgaaaaggtagaacgacgatagccattgcgcataggttatctacaattcaagattcagatcaaatttttgtgatgcatgatggagagatagtagaaagaggaacacatcaagaattactaagtgagcaaggtttgtattataatatgtacttgctacaaaataaagtgagtttgcaaaaggccttgtaatacaaggtcttttttattttgtatacaacatatgtttactctttgtttctatagcataaatgttgtgtcctcttatgaaacttgtacatattgtatgtatacgaagtaaaaaaattgataggagattttatatgcaaaacagatcaagttcaaatgttacgtttattgatgtgtctcattgggaagggaatattgattggaatgcagtgaaggcatctggaattccagcagcgtatgcaaaagcgacagaaggtgtaaactacattgatcctacttttactaagaatgtacaagcagcacgaaatgcgaatgtattaattggtgcataccattttgcacgcccagaacaaaatgatgcaatttcagaggcaaaatattttgtgggtatattacaaaataaccagacagacttaatgccagttctggatttagaatcaccaacagatccgagcaacagtaatttaactggtaacgctatatcgaattgggcaagaagcttcataaattatgtgaaacaggctactggaaaagatgtaatgttatatacaggagtttggtatattaatgagttcggaattagcggattaagtgatataccgctttggattgctaaatactcgagtacaccgcctgctgatgctggtggatggacagcgtggacagcgtggcagtacacagattctggacaaatttcaggcgtaggaaattgtgatgtatcagctgcagtttcattagaagctttaaaagggaatggagcaagtggtggaggtaatgtttccccgcctaataatgcaactccagtgtacggggttgctataattaatggagataatgtgaatttgagaagtggaccatctttacagtctagtgtaattcgccaattgaatcgtggcgaaacatatgaagtttggggagaacaagatggatggctttgtttagggacaaatcagtgggtatataatgatccgagttatattcagtataaacattatgtagcgactattactggtgataatgtaaatttgcgtgatgctccatcattaaatggaaatgttataagacagttacatcagggtgaatcgtatcgagtgtggagtaagcaagatggatggctttgcttagggacaaatcaatggatatactacgatccgagttatattcagtatggtgtacaatagagtgaaaataaaaggtgccccgtcagaggtgccttttattaaaaatatacaacttttacaaagtctatatcgaaaccatagtatactatagtagatatatttataaaaaataatcgaaaatgaaataaaggagtaaaaatatgaattatgtgctaataggtgcgattttaatattattagctgtagcatttgtgctgttttataaaaataaacagttagaatcagagagtcagcaagtagaatttgaaaagaaacaagcgattgaaacgtataaaaatgaaattgcagctacagtgatagagcataaagaacaacaaaataatttaaaaaatatggaacagaaaaaatacaatgatttacaagtaagtgcaaatagagaaattgaaaatatgcgtatgatgaaaaatcaattagctatgcagcatagtaaagaacgtagtgaaatacaaaataaacataataacgaaatacatatgtttcaaaaattaattgcaaatttacgagaatatactaaaaacggtgctgaaatgaatacgtacgaaacattacattatatgaagcgaggattcatagagcaaggcatcatattagatgctgaaattcaaatcatgccgaatgtttttattaaaaataatagtgaaataaacgataatcgaatccatcatctcatcttgtgcaaaactggtatttatctacttgagacgaaagaatgggaagagaaattaattcatggtttaacgaaagaaaatgctggtatatattcatttatgattgatgaaatgggtaagtatcaacaagaagttgaaaaagaagagacatttgaatatatagtaggtaaagattcgtcaactatacaagtgaaaaatgaagggaatccagtatataaggtgaagaaactatctcaaattttatacaattgtttgaaagaaatgcaggctaatagtataaaagaaaaggtaaaaccagttgtatatttttataatgaaaatggaaaagaaataatagatctttctagtgaggaaacacctagattaaaaaatcgggagcaaattgtaacgttcttcagaaatgaaatcttagcagggaaagtagtatatacagtgcaagaattagaacagattcgagaaatgattagccggatgaattatatagtgagttaaaaggggagatctttctgaacgctatgctacgtggcattttgtatgtctatttttgtttgtatatagtaatgtacattctatttatattcgtcattgatatggtccatatacccttaagtgtaaggagcatttttgtagtattcataccatttgttttattagtcatgatttaaagggctattttatatgtttctaaaaatcgtaatgaagaaaagaagcaaatgttgggggttttaatagtagcactcataccattaatagtgtgcactgtacaactaagtgtaaatgaatatacatcaaagtttaatcaaaatagatggttaaatcatgcagataagcgggtatatatggtagatgatctattacaaaaatataaattaatagggaaatcaaatgaagaaattatacaattgttaggagctccaacggaaacgagaagtggggaagaaggagttaccactttgtattatcttgggactgaacgtggctttattccaatagatagcgaacagcttgttttccaatttgatagagatggaaaagtcatggaatatacggtgcataaagattaaagaaacgtagagggaagctatatgttatagcttcttttttatttttcaatatgtcacggaagggggagaaggtttttgagtggaataaggaatgaaagcggaggtgatgcatatatatagatgcattgggtgattattagtccgattggtgaggggtaataattaataagtacggacaaaaaccccactcattaaagttttactttatcatattgtataaatgaaaaggaggtaagacggtgaaagcaatcccgactgatgtcctgagtaaagaattgatggaaagagaaggagttatatctattacagtaaaggaatttgaaaaaatagaagtagctggagtagtggtcgctggtccagcggttattttgattaatcaagattaagtacatatttttgaaataaaaagcatccgtctaggatgctttttatttgtatgtaaggataaatatgatggataattgtgttactggagggaaagtctgtggcaattattataacaatgttagtaatgggtattttattaggatttgttggagctggaggagctgggtttattatcgcgatactcactttagtatttcatattcctattcatgttgctcttgcaacatctttaactgcaatggcatttacgacattatcaggtgttgtcagtcattaccgtgaaggcaatgttgcatttattataggcgggattgttggaggatttggcgcaattggctcttatattggttctaaatttggttcacttataccagcacatcttcttcattggtttacagctgggatgttatttttatcggcaatttttatgtttattaaattaattatgttccaaaacaaagaacagtcatctttatataagcataaagagttttccatgaactacttgttgaaatgtatatgccttggattagttactggaatgatggctggttcatttgggattggttctgcaccgtttattcagcttggattaatggttctattgagactaacgattcagcaatctgtagggacaacgatgcttgttatattaccgattgcaattgggggtgggctaggatatagttcggaaggatatttagattatatattgttattgcaagtattaatcgggaccatgttaggggcatatattggcgcgaagtttacaaattatgcaccgcgaatgcttttgaggttttcgatgattatgacaccggttttagctggatgtatgctattgatggaataaggtgaaattataataagtagggggttactgcttacaaatagcgggataaaattaatatagcaaactattaatatattttacgaatgaattatgtaggtaattcatatttcccatataaaaggatttgttttaatattatgagtgtaaagttcgagtattcgaagtactacttgaattatatccctatcccttttctaaaaatgcgaacaagttttgccctattctattcaatagttaattgtatagaaatatattgttcgatgaccattatggaacgtacataatgggaaaatcccgatccttaaagaggatgcccctaatcttcatgtgaaaatatgatcggataagaaagctgaccaattgatggtcagctttctttttgttcaaaaacaattttttctttaatttctgtttgtaataatacagtttttccgaagcgacgtttgcattccgcacgcactttttcaatggctagtagctgagtagtggcgggaactgtgacaatagcttggcgaggctttcgattttcttcacaaaagacacattccacaacataattagaaatcatattttcatccttccagttttaatttctaagaagggattgcctatgaagttgatgtaatctttcgtcattgttttatttttttcctctttttttcaaggggaaaataaaaaagagggcgaattttagtaggggagggatgtttatggagagatggataggtagtgcagcggtatgtgtaaatgaaagaaaggaagttttaatggtactgcagggcaaagagggagaagaaaaaaggtggtctgtcccaagtggaggacttgaaaagggagagacactagaagaatgttgtattagggaagtttgggaagaaacaggttacaatgtggaagttgtaaataaaatatatgaaaaagagggtattacatacggtgttccagtgtatgtccattattattttgttaaacaaataggcggtaatatgaaaatccaagatcctgatgagttaatacatgaaattgcttggaaagggatacatgaagttgaacaattgtgtttagcttttccagaggattatgaattgctgtgccaatatatagataaagaagcaagtatgtaaatacttgcttctttaatgtatccaagacaagaaaagcggaacgataactaaactagcgcctgctgttaaaagcatagataaacttgcaattgttccttccacaggaccgatttcgaatgcttttgatgtaccggttccatttgcgcttgttcctaacataataccttttgcgattgctgttttaatacggcaaatacgtatgagagaaggaccgagcaatgctcctgttaaggcagttaaaacgacaaatacagcagttaattgtgacatgccaccaatcatttctgaaatagccattgcgattggtgttgttacgatatgtggcgctaaactatgttctagtgatgaatcaatttgaaaataatttgctagtagtgctgaagtaatgactgataaaaacgaaccgacaatgacattaagtaagatagccattccatgtttctttaataaatcaaagtatttatagattggccatgcaaaagcaactgttgcgggttttaataattcagttaaccaatgaccaccagattcatatgtttcataaggtgtatctaatccgagcaataaagcaattaaaataatgggacagacgagaagaggagaaagtagactccaattccagcgttgatacattttttttgatagccaatatgtgaatagtgttaatagtaaacaaagaaatccgatcattgcgttgatcctttccgctttagtagcaattctgttaaaagtcctgtaactaaggtaacgcaaagagtgctaatcataataattaaaatgagatcgattccatattgtgttagtgtatctctgtaacgtatgacagcgactgcagaagggatgaaaaataaaataagttcttttaataaaaaatctgctccgtcctgtatccattcttttttaactaggttaaattttaatgaaattaataataagaaaataccgattatacttcctggaactgggaggtgtgcctgttttgcgatccattcacctgtccaagcgaaacaaaatagtaataaaatttgtccgcttaacttccaccatttcatacagtaaccacctctttcttttgttacataaaaattgtaaaaaagaattaacaatttctactatacgttcattcaaaatatttgtctaatatataaattatatgttattaatatataagacatattaatcgaaagtgaaaagggtgtccaaaaatggaattacggcatttgcaatattttgttgttgtggcagaagagttacactttggacgggcggctgctcgtttacaaatgacacaaccaccacttagtcaacaaatacagcaattagaaaaagaaatgggagttacattattttcaagaacgaaaagaaaggttgaactaacagaagcaggagaaatgtttttaaaagaagtaaaaaaagcgtttgaacaaattgaaaaagcagtagaagttgcacaaagtgcgcaaaggggagaagtaggatcactttcaattggttttgtaggtgcggcgatatatgatattttaccatcaattgttagggaatatagaaagaaatttccgagagtgtctgttgcattacatgaattgtcaacaccagatcaagttcatgcacttcatgataaccgtatcgatattggctttttacgtccaccaattccaacgcaattattagaattagagccaattcaaaggttatcttgcactttgtgtttaccaaaggcacatccacttgcagagaaagatgaaatacatatagaagatttacgagatgagccgtttgtatttattacgagaccagtatggccagctttgtatgatacaattttatctctttgtagagaagttggatttagtccacgtattgtacaagaagcaacagagtatcaaacagttatggggcttgtagcagcagggattggaattacagtaatacccgtgtcggcaaataagttatataaaacagaagttgtatataaagagttatatgattctaatttcgttgcagaaatgtcagtggcttacaaaaaaatgaatagtaatccagagctgctagagtttttaaaaattgcaagagagaagaaaagaatagaagtagaagatgagtaatagtagtaacagaaaatggatttgattcaaatccataaaagtacaccttattaaacaataaagcggaaatgcaacttaagttgcatttccgctttattgttctttttttagctcgatactaaatagataaacgtgttcattttcttttaagagtaaatcaatacccttttcttcgtcaattgtagggacgcttacagtttctttactggtttggattacagcagctaaagttgttttttgattgtattttaaattttttatagattggattgtagtagttgcagagctatttacgcttggtggcgcttcttcaggaacaagtgttgaaccaccttcaatattcagataccactgccttttttcttgtatatctttatcaaattggaaatgtggtggtaaaaaagaaagctttactttcttttttgaaaaatgtgaggtagctatattagcaatttcttttgttttcttaccattgttataataatcaattgtagcatttatttcatctttatcatttttaagcgtaacgttataaaatatgctatttccttcttgaaaaggagtcatttgtaaaatagaagcttgctcttttgttaatttgtatggctcaacaatggcaacttcattgttttttatttggctacaacttgtgagtaataataaacacaagattgatagtaattttatacgcatgcaacctcctcctttttacaattatattctaaatgtgattttttatcattgcgttttctaggactaaagacttagaagaaattccgattgtagtgcgatgtttaaaatgtcatatttttatacactagtagtatagaatgcgtatgtaataaggtaggggaagaattttatgtctttatgtcggttagcgagaaaaaatattataacatttgctaccaaaaggatgaagcaatttatgtggattgctatgagtactatgattttgttttttatgatatcgttacaatttaatgaaggagctattttgaaagtagggaatgcatttgtatttcaaatgtacttttacacactttttattgtactaattttcatatgtatttttactacatataaaatgatgtactcccttttgcatgtgaggagggaggagtttatatcttatgtagaagaaaatatgaaaagaaaagaggtactatgtgtattatgtcaggagcaattattcatttatggagcagcatttgtttttggattaattaatgggatgctatttttgaaattattcacggttatctttatgaaaatcgcagggatacaaggaataaatagtgcgccaattacaatatatgcagttgtaattattagtgtaattatgatgactgtcgttttaatatcgatgatgcaatgttatcgatttgttcgaaatttaaaaggtgaaaattcgttgcggtttaaagaaagggcatgagaaatcatgcttttttctattttacacataaaaataatcatgttacagtgaaaagacctgacaaagaatgggaaggaaaggttgtatagaatgacaaatgaacaatcaattgtaaaagtcgatcggttaacgaagcgaatcggatcaaagacacttgtacaaaatattagttttgaagtgaaaaaaggcgaggttgtcggtttactcggaccaaacggtgctggaaaaacgactttaatgagaatgatggttggtatgatccgtatgacagaaggtgaagtatggattgatggtcaatctgtgaaacagcaattcgaaaaaacagctgcgaaaattggagcggtaattgagacacctgaattttatccttttttgagcggctatgaaaatttaacatatttcggacgaatgaatggtaatgtgaccgaagaacgtatcgatgaagtagtgaaattgttagggatgggacaagtaattgatcgcaaagtaaaagcgtattcactcggcatgagacaacgtttaggaatcgctcaggcacttattcacgatccagacgtgttgatactagatgaaccgacaaatggattagaccctagtggaatacatgaaatgagaatgtacataaaaaaattgcacatgaacaaggaaaagctgtacttgtatcaagtcacttactttcagaagttgaattaatgtgtgacagagttatcattattcagcacggggaatatgtggctacgcaaaatattcagcatagccaaagcgaagagatggagacgatccgtatacgtgtagatgatgcgaataaagcagcagaaatattagggcatgatgttttagtaaaagataatgaattacttattaatgtaaaagatgaagaaatcccaaatgttattcgtacattgcttgagaaaaatattcaagtgtatcgtgtatatgaagaaagaaaaacgttagaagagcaatttttagaattaacagggggaaaagatattgtttaatttagtatataacgaactgtataaaatatttaagcggaagcgatcgattattccatttgcagttattgcagtattaataatcggattaggatgggttacggtaaagtattttgaaccggaaacaaaaggatggaaagtagattatacagaacgaactgtagaaattgagaaaaagcttggcatgaaaaaagaagctattttagcagaaaaatcaggggatgagcttgtaaaagaataccagcttaagatgaagcatttagatacggatacagcaccggcaagcagttctccactttctttcatgagagatacaggttttatcgtatttccaattttgctcccatttatcctcgtgtatgcaagtacaatttttgcgaatgaatatagctggggaacatataaatttttaacgatacgaccagcgagtcgctttaaaattttaacagcaaaatttttagcaattgttatatttgcagctttattatttatatttaatatgatcttctccgctttatgtggacttgttatttataaattccaacagcctgcatggagtgagtttattttccaagatggaaatataataaaacaaaacatttttgtagaagcaagtaaatattatgttttatcgtggttaccaacggttgtgtacgcatcgtttgcatttatgatttctgtgttaacaagatctagtggaggtgcaattggtatttcactattccttgctttatcaggcaatattgcgctattagcagccactagatataactgggcgaaatatttattgccagcaaacacagatttatatagtatttcaaagaatggaagttttattgatggagtaacattcccgtttgcatcatgtatgttgttactttatttgttcgtatttttatgtatttcatatactgtgtttttaaaacgtgatttaacttaataagaaaagccgttcagggtgtgaagtgacccccgaaagttagacaggtcgtttcattaggcagcctctagggtatgagcccggtattgtactgggctcattttagcaaagaaaatgattgattttgtacatgcttaaacaagcgaaaatgtacatgtttatcttgacatttacacatattttcattcatttcctcttcctccttcatattttggatatattctcttaaagcccttatataaaatccacttaattattcaatgctctgatctcattttcctaaccttactccacaacatgaaatagcatgttgcaaataatataaatagaaaaagcattaagtatgctagagcaaatatcgcttcaattaagggtctttcataagcccatacattaaaagcaatacctaatatgatacaaagtaaaactttataattattatttaaagctttcattttcctgctctctttcttgaactgtaatgtttcgatttactctctccctatcttgatgggacattctattaaacttttttattgcctcttcaaccgttcccgcttcaacagtcacttcaaatactcgaacctctttatatgccaaattaaattttttcattttaaaaccctttcctaattccgtacttttacggcccttctgttccattctctattttgaaatcatagttttctacaaaccaattttcattttctagtaccaagcttaatttcatgctatgattctcttttttcttctctccctcaattgaaattacatattcataattgacagtaacatctgctttgtcttcagctgaacgtgtatagtacatatctttcacattcgcttttgtcatgtaatgaatggctgcatcatcaatttgcttatgtgaatcttcaccagcattaaacaatttattttccgcttcccccttaactaatttccgtaacgcttcaagcccttttttctccttatcattactgtcatacgtcattaaagtttctacaaaatttctggccactacctgacctttttcttgcgtattttcttttagaacttgcaaacgctcttctaattctttatttacattcttcaattcttttatttcagctgtaagttttgtcttctgttgtttagcctcaccctttaaatcagaattactactccatagtgtcaagcttgtaatacttaacgcgataattgcgccaatttgtaatatttgtttcatttgatttcctcctcgtatattatgtttaagctgtcacttcagctttaatttcccttaataagagatccgtaaattaatacttggacgtctcaagatatttctagataatggtcttaggatcatttgggacaattctttttcctcctgtggacttaccacataattaagagtgtttctcagtgaacgtgcgggactccctactcgcaggctgagcagcctgaccctcgaacctagatgatagtagctctagggcggctttcgattcaggacaagctctcatacacgaggttgttggtcggcgtacacactagagatatctcgagacgtccaagcaatgattctaaaccgaaaggaggtctcttacgtgagattatttgttggtctagatgtaagttcgtttgatataaaagtttgtattttaaatggtgaaggaaaaaagctggattccttttcggtcaataatgacttgccaggtgccacagcaatcaaagagcgattattgcagcgtatagccaatcaagaggttaaaacctttaaaatcggcttagaatccacatctgtttatagttttcatccatctatgtttcttcactatgatgaagacttacaacgctttggagcgaaggtatttcttatgaatccaaagcaaatcgcaaacttcaagaaaagctattctgacatggataaaacagatgagattgatgcatttgtcatcgctgattacttacgattcggacggaatcaaatgtccatcgtcaaagaaagccagtatgtggcacttcagcaattaacaagatctcgttatcagctcgttagaatgttgacaaaggaaaaacaacattttctccaacacctaagttataaatgtaatacgttttcacaagaggtggattcttctatatttggcaacgccatgatggaattgttccttgaaaaattcagtctagaagagttagctgacatgtctttagatgaactcgctgagttcctacaaatgaaagggaaaaaccgatttggtgacccaaaatgtgtagcatcaacaattcaaaaggctgttcgctcttcctatcgcttggataaggtcgtggaagactcaatcgatgtccttctcggaacatcaattgcggtaattcgtacctatcaacaacaaatcaaagaaatagagaagtccattaagcgaatcatggctggattaacgcaaacactcgaatccattcctggaattggtcctgtattcgccgcaggtattatcgctgaaattggtcaaatcgaaagatttgatgatgaaaccaagatagcaaaatatgccggattatattggcgtacacaccagtctggtcgcttcactgctgaaaacacttcattatctcgtaatggaaatcattacttgcggtattacttagttgaagccgccaactctgtaagaaagcatgtatccgattaccaagaatattacgtaaaaaaatataatgaagtaccaaaacatcaacacaaacgtgcactcgttctaaccgcaagaaaacttgtgcgattggtggatgcgctactacgtagtcaccaactctttgcgccagaaaggggcgtgaaagtgtgacataaaatttgtcatcgctacctttgaataaattccattattttacatataatgctggtctagtttcgtgatgtctttttttagcaaattgccctttgataactttaaacgtttatattttttagttgacatattaccgtaggtcttattacggcatatatggtgccgggtcaacctgaccgtatttaaatgatgttttaatttcgaaatgtaaatgcgggccagtaacttgccctgtcgccccacatacgccgagctgttgccccgcttggaccatttgcccctgttgcacagaaagtacgtccatatgaccatataacgtccacaaaccgccttcatgttctagaaccactgcatttccgtatccaccaaaaccactaccgctggctccaaactgtgcaaaaccaactcgaccagcttttgccgcgccaatcgctgtctgtcctcgcgtacacgcataatccgttcctttatgaatcgtgccccaacgcggaccatatgggctggtaacaagtggacttcctggaatcggtaaaacaaatccatgcgagctaggatcacccacgttcccaacacctccgctatctgctggtgtacagttaaatgtaagtccacctaactgctgagcaaactttgtaactaaagctggccataaaccatttgtaccgtgcggatcatttgccgcgcccggcggtgcatacttagcaccaattgcttcaattgttgtaattcccattcctatataatttttgtataagttacgagccatgccgtttataccttcttctaatgtcgcaaactgaataaagcctgtcatgttagtacttgcggggttcattaatccacctggattgttatattttttcacagcattacttgtaccgttacctgtttctagcatcgctatagcggttaataagactggatcaatattattttgtgtacctgcatcaataaaagcttgccccttagatgtaaacacacccttcaagtgtgggtctaaatccgctgcggtcaattgtttgtcccctgggcggcaaattgtattacctattaacccgcccccaccacttactggttcttttttttcatcacctaaaagcataaataagacgattcctattaaaacaaagaaaattacaattagagaaacactactaaacaaacaaccactaaccatccatagtttacggactttacttattttcgctttctttttggcttctttttcctctatatcctcgtgctctaaatccacgcttcatgtacctcccttacaaaaaatgccccgctataaactagcgaggcattgtaactaaatacatatttttatattgtttctgtttctatttttatttcattttcttcagctaaggtttctaactctaccttttgttgtgtcgcatctatcataatttcttgcgatgctgctacttctgcttgtgcggattctatatgtgttgtttcatttgttctatttattttatcggcttgcgaagactctacatgttctgacggcttcgcttccaccgctcccctaatctcttgcgaagccccttgtctttgcaagacttggctcccttcaaaagattgaccttttacctcttgttctcctaaactatttccattcatagtttgaccttttatcccttgttctcctaaactacttccattcatagtttgtccaggaatcgaaccggaagattctagcgaatccgggcttgtcatcgtcaagtctcccgaagattcgacggatgcaccttggatatcattaacattcatcgattcattatttatacccattccaccaggcttcgctatattaaattcaccaactgacgatacttttgtcgaaccatttccaattggacttccctctaaattaaaaccttccgttttcgtcgaactttttgcctccaacccttttgttgaagtcaattcctttccattcgtttcatttaatacaaattcattttcactcccactttcctgatctataccagatggattaactaccccttgtttttcatccaatgatggtacaatctcacctgattttccagttgaatttgaagttccttctgaagagttcagctgtccaacactggcaatttgatttaaggctccttcaccattttcagtttcatattccgaaacgttatcttgctcctggtgtcctggtgtttctatatctgatacttccatattctctttttgcgagtctgtagtactttcttctgtcgtcgctaactccattgcgtttccttctccatgtccagcttcgtaattagaggaatcatcttgttctacctgttctggtgtttctatatctgacacttccatattctctttttgcgagtctgtagtactttcttctgttgtcgctaactccattgcatttccttcttcatatccagcttcgtaattagaggaatcatcttgttctacttgttctggtgtttctacatctgataacggttcattattttgtgctgaatccacttcagtttcttcagtcgttactaaaacttcaccgttccctccatcttgttctgtttcgtaatcggaaggatcatcttgctcaggctgctttatatcttctacatcggacaattccggattttcttcttcgccatcattcccattcattgttgccaattcttcattattttcttcttgattttctgtttcataattagatgggtcatcctgctcaccttgctctggagcttctacatcctgcaattctgaatcattttggtttgccccttctccttcctctctaatttctgaaagttcttcgttattatcttccccttcttggttttcgtattgagaaggatcgtcctgctcaggctgatctatatcttctacatcggacaactccggattttcttcttcatcatttccattcaccgttgccaattcttcattgtttccttcttggttttcagtttcataatcagatggatcatcctgctcaccttgttcttgagcttctacatcctgcaattctgaatcgcttttttctgtaccttctctttcctcattaatttttgaaagttcttcgttgttatcttctccttcttgattttcgtattgagaagaatcatcctgttcaggctgctccgcatcttctacttcagataactccggattttcttcttcaactccttctaacgatgcaaggttttctggattgacttcttcttgatcttcttgatactcttctgtctcttcttgctctgcatttacaaccacttcatcctcatcttcatcaattgtggctctttcttgttcttcctcgacttgcttttcttcgtcttgatgttgttctgtttgttcgtcttcttcaccaatacttgcatattttgttttttcttcttcactttctcccgaaactttctcttcatctagggtagcttgttttgttccgctttcatcagctgtatgttcagaaggatcatcccccatataatttggatcagaatctccaaacatatcttttgctcttcctacacctgcattaatgccatccattgttcgattaaatccatcctttgttttgcctgccatatactctaaatccgtaaatgaattatacgcaaccttcgatttacggaatgccgctttgatgttatctctaaagatataacaaaggacaaataccagaatctgaaggatcatcgtcattaaatagccagatgttcccgcttccggaagttcatataacagcccagcaattgaaaacagaataattacaataagtgacaagaatatttttgcggctaacggtttaagccattgttcagcccaactaattaaaacgcgcctatttttaggtagtaatgcaaaagccatcgctattggaccaataatactcattaccataaataacaattggcacgctactatcagcaagcatataactgctgttggagctcctgcaaaagtatttacaatgtagtacataaatgtaaatatcaatcgctcccctaccgactcatttgtcatcataaaattcttatgttctttaacatcttctgttactaacttaaccctatcttccccaggtggtgtattgattaatttatttaccctctcgacaccaatagtgtctagtgaatcttgaccatattgtaagtacaaatatggacgttccaccatcaattcccacatttgtgcttttacattcgctatagcccgactttttgtttgccctggattcccatggatcgttccggttgtcttacttaaaacttgaagactaatttcagaactaattgtattcattcctttcagaatcgctggtgcatttgcgatgtaaatcaatatccctgcaataacacacactaccttaaataattcacttatcccctttgtcatttgtctttttacaaaaaacagataaataaaatatataacagataaaatacatgtcattttaataatcgacgggaataaaccttcactttcaaattccggtttacttccaatccccgctatattttgcattgctttacctaatttatctgcaacaacatcgataatgtctaagctgaaggattgttctactataaataacaatatttttgtcaaccaaaccccaaactggaacattaatgaaactatccattgaccaactccattaattttccgctgtatatctttccccacagaatcatcaccaaacatatagccccaagcctttgagaaaaagcctttctcatcgtctttatgtggtgcggtatctatctcataatgaacattctcaaaatcttcttgtttagatttatcaaacaagttacctgaaattgtattggcctctgacgcttttggttcgtcctctgcaaaggctacattcggcacagtaccgacaaataaaataaaaatggccataaaaagagggaagagctttttcattctcgttccccctcccacttatggacttgtattggcttcttatctcctacaatggactctaaattgtgagtatctccccaagcccaaccgtaattcttccattttccatcttttttatcttttatcatttttaattccacactactcttcccacctgtacctggatgataataacgagccttgtaataaaattcatttgaaccttcttctagatcatacctaaacagctcatatcgcccgttcaatttatcacttgcccctggatatgttacattgtattccttcaaaaattcgtattcatttatatgcaattcattcatttttttattatctaattcaatataagctttcatatattccaaggctgctttatcagccgcttttatattaatcgatttctgattatctatcacttcacttttagtagattgacaggctgtaagggttgttacaattaaccctccagccataatagctcctactaaatagcccaatgttcttttatatttcacgattccttcactcctatttcgccttatattaagcgcccgcgagttcctgttcacgttcttccgctgttttcgttgaagaatcaaatgcctctgctaattctttgaaaacaggatcaactttaataactgctgtacgtccatagatgtcttggaacaagcaatgacccctttttaaattctgcaacattcttatattagcgtctgttactggcaaattataatatcctaacatttcttttgcttcagcatcatttttcaagcaataggagaatttcattccaacgttggcaatctccttattcgctgaattaaaatcgctcgcattttgtgtaccaagatataatcctgtattgtgataacgccctttacgaataatttcatccgaaagttttgccccttcacgatttcgcataacgtttttagcttcatcttgaatataaactttaaatttcttacgatctgttgaaagcataagggatttaccgaatgctgttaaagctgtaagaacactttctgataatttatcagtaatactcaatacagtttgctctaatggtggtaatgataaatgttgaatttgtaaaacttgtaaagccctttctaaatctaaggctctgtaatcctggccaggcttaccaaacaatagatttgcaagtggcgaattttcaattgtatttaaacgtgttactaattctgttaataatgccaactcttcttggatcaattcaccatcttgtttcatttcaaacaattcatcttttactaaagataaacaaggctcttctttctttgccactcgttgaattgctgtccataggaagtcatattttgaattctctagcgttacacctgttaaatatgttaaaacttccaacgataaactcatcgcatcttcttttgttgcactaacacggaatgggtctaaacatcctttatcacgttcactttgtcctaaagtccacacttccaattgatccttatttttcttaaaccctgggagcaattttggccattcacttctatcccctttaggatcgacacaaaatgcaagcccatcgctcataacaatccagtataataagatgttcattaagaacgatttccctttccctgtcataccggctatcattactgataaactatcaaattcattatttaagttctctagcgcttttgctgctaagtctggtctaataaagactgggcgatttaatttaactgtacgaccaatatagaacccttgattgtcgccaatttgtgttgttgccccaaacataccttgtgctaaaactcctggctccgcatatattttaaaatctttattatagcgtttggcccctgggaaaaattcatagaaatatgccatctgatcgccataaggatttactaattgaattttcatctttctatactctgtaattagtttcttaacgcgatgagccaatgttttttgatcttgagcatgaacagcaaataaaatactcatttcaaatcctggtgcacccgttgtctggaaaacgtcttgcatcagtttaactccggccgccttacgatctacagtccggtctactgttccaccaagtgccgcctggtgacgttggtcatttaattcccgctcgctattttgcaatccttttagaacactcacattctccatatgatgaccacgaatacttacttccaccgggaattttaaagaatgcgattgtatacgatatatccattctcggcctggaaaatgtgattgtgggtccatatcacttactgcaagaaacgaaacgtaactttcttctaaatccccctctgcatttctcctttgaagtcgaatacaacggccaggctcttcatctacttcacactcagttaagcggagaatagcatcacgatctggacgtgtagcctttttagtttctccattttcatctacccatgaaatttttcttcctacattccaatccttcactgtttctggagctgtcattccacgactgaaattatgttcaattaagaaccttgtaactggtggcgtcgctcttctcacaaaacgaaaagcgcctaacaattgattataaataccatcttcagcttccttataatcattaatctcttcttctaacaaatcactttcttcaattcccattgctcgaaacggcgtttcagtaaacccctttataaattttcgtgcgaattttgaggtttcaattactggatttttgacttgtttttcttttctatcctgatttaattgcaccaataagaaaaaatgatattctgtattttcttttgagactgatgattgttgcaaatataatttcactttttcaaaaaggacctttgccgtgttagacaaaggtcctttcaatcttgcaatatgttcatctataattgcgtcagaatcagttacttttggaatgacaagtaaatgaaaatcactttctaattgtgtaaataaagacttctggtttgagaaatatgttttcttcatccgatcactttgatgttcatattcaaaaccttcgacttcataaatactccaaaccctctgatctggacaaaaacaaagattatcctctacatgattaattgggaattccgatacactatttaacgcaagcattaaatatcctcaccttctatattttcaatattttttattaaacattcaatttcatcctcttattttaataccattcgtcttcttctaaacgcattgtttcgaattcttctgtctcttgttctattaaagtcaacgggtaatcttcaacctccccttgactcgtaggtataataggaacaatatccgattcacggtaacgaatgaaaataggactttcaaaaacatatttttttggtttttcaaactttataaagcgtgacattttatgtggccttaatttaaataaaatccatgatctagcaaacactaaaaatgacttaccatctgttttatacgtatctaagccccaaactgcaaaacctggaatgataatataatatggaagccaaaattcatctgcaattggtccaataaaccaagaagttaatgggaaaactcttaatataacaaacaccaatactattaaggcataatagcctaacatcttccacgacacaggtcgtggaagacgatagcctaataattcatattggcgacgttcatatttcatataacttccgaaagtatatacaataaaaggttttgatttttcttccatcagcaagaacgcctccttatttaattacattcctaacattccacctaagaatgatcctactttttcaagagtttctggtgctgctacaaggaagaatccaaggccacccgcgataacaattgtaacaaggaagccccatgcccgcttcgcaatacaaaagataactaacccaataatgataatccctaaagcatatttcccttgtgttttaacccagtcatacgctccatccaaaccaaatcctagtatcatattatttaataaattcattttattttcccctctctatttcacagtcatatcagtgacgatatattgttttccttcttttttaactgttaatacatatttcattgtcattttggattctgaaacagcatccttcatttcagcaattgtataaacatcaaacgtacctttctttgatcctacatataccttcgtttctttgatttgttcaaagtgtagcgctccttctaaccctttaatatctttgttgtgtaatacatactccaattctttttgggtcgctgttgtgtaagacttgaagaaagttggtaagaagtcgcgaatttcttgtttcgctttataatctgcttcatctgactgcttttcatctttatcaactttgatttttgctttattgtctactttaaccacttgaggatttcctgttacaataaacccttttccatccgtttgaattggtacagcaattgtttctgtaacgtctttcccttcatcttgacgagtaagtttataatccactttaagaaccatatctgcactttgttttccagtctcttttacccgcacaatggaagcttgtacataatttgcatcccactgaagactgtgcatatctaatccagcttgtgggtctgctccttctaataaatagggttttaaacgcccttctctattagcacgctcgttatccccacgtttccaggtaaagtattcctttgcaaattgctttgtaaattctaccgcttctggccgtgtagctccattctgatctaattgcactttagaatccggccccttttgcaccattgctttcaatttattattcgtaataagcccggtaatcgaaaccgtgaacatccataagaagagtacccagaagaccacattcccgatcttcttcgctttatacgaaggtattcggaaaggtttcctccttttttccctccacttattcaacctttcttttaatcccacaccatttcactcctaaccttttttatcaaatgcttttgaaaggcccataactgcaactgttacaacaagtaacccttcccagccataccttccataaatctctaaaaacatagattttatttcttcataaaccggttgtgcttctgggaatctacgaaaaataaaatcttttgatacaactaaaacaataactgccgttataaaagaaacaattgttgaaagtacaaatcgaaacaccctcttataacctcactttctccttaggattttcgatgttccgataaatcgctccaaatggattttgtaagacttcttcaaacatcacgacataaacaggtacttgcgggctctccatttcttgcatataccgtaacaattctttttgtcgtccctcattaccagcaataaagattagtcgccatttctctattgggtatgttagacctgcatatcgatcatattttttaaccgattcctctcggcttaaaaagtcgttataccttcgtagctttttttcgataacctctttcgttccataagtacgttccatttccaaaaacaagccataattaccttcgattctgtttttcaagccaataacagccaatccatccggtcgaataacagcacttttatttttgtcatattgaaacgttcctcttgcttcatttatccattcttttattccaattgggatgtctgcctttgattgctctaacatggcacattcaacatgagccaacatcaaactatgataaacgaaagtcgcaactcgattggaccatttgtaattccaatgaacctcccctctcaactcccgcaccatttcaaccccgtacttatcaagtgtataaatatttgatccgttacctgatcgcctacgcttcccacgaatacttgctactggatgtctttcacttttgatgtagttttctttctctagtttcgccagtcttgcgtagacggatttttctttatgattaggataatttttcatacgaatatattcaaaatctaaatagatatgtgtatgaatatccatcaataattgttcatcctcagtggttaaaatcatcttcatcctccttcccaccatcaaaagtcaaagatacttttttcttcttttgattcagcgttttctactttctgtaattcctcatttttaatttcaacgggatacttttctttatcgtcatcccccgtttcaaacggataattaatttcctctttctcttttaaaaaaatatgatcggtgttctccatatcccagggaaaaggcatatccataatgacaggcgattcctctcgcgtcgcctcttcggttttctcaaagagcgattccttttgcgtcgcctcttcagctttctcaaagagcgattcctcttgcgccacctcttcagctttctcaaagagcgattcctcttgcgccgcctcttcagctttctcaaagagcgattcctcttgcgccgcctcttcagctttctcaaagagcgattcctcttgcgccgcctcttcagctttctcaaagagcgattcctcttgcgccgcctcttcagctttctcaaagagcgattcctcttgcgccgcctcttcagctttctcaaagagcgattcctcttgcgccgcctcttcagctttctcaaagagcgattcctcttgcgccgcctctttttcggccttttcaaagagtgattcatcctcttttttcaagttcactttagttgaagctgttatgtcttggccatataagaaaaggttaatttctcgatctatttcttcagctgactttcctcgcttctccaattcacctatttttttgtatgtccattcattagaatcagcaatttctttatcatttccatacgttgcaatcttgccatttggtctatagcggtctagaggtttcgcttttatcatgcaccacacatttttcgcttctccttcaaacttatcttgcgtttgaatggctgcatgtaagtcgggtaacccttgtaaatactcagcccgaaatttcccttgcataactccctctagagttttagccgaagacttcccttgtctacaaacaaagaaattaccgcctatttccgtaagagcatccgttaattccttatctagctgtcctgaaatttgctgcgtaataatccaaagtcccaatccgtacttccggtcttccgctacaattttagggagaattggaacttgtactttgtgagcctcatctataaacgttaggtgtaattttgaccccacctgtcttttttgcacaacacggtgatactgattcataatgtagccaatcgttaacttaatatctgtattcgccatacctgacaaatcgtaaaagataatatgtcctttttccatccaattaaagatatctaaagcgaactcagattgcccgtatatacgttttaagtatgtactgctcctgaatatatccaatcggttcaacaaaggctgcacactatcttctagcgcgttccctatttcatttttccaaacatttctatagtacgttgactctggaccttctaaaccatctaatacacgctctctaaacaattcatctgtacaaaatgaaataatacttaatgtagaatgcttttggcttccatcacataatagcgttccaataatcgattttagaattctctccgtttgtggggctggatttggaacaagagctttaatactatcaaaaatggagtcaaccaccgtttgcatatcctcacctggattacaatgtaataagttaatcgccggtggataatcagtatctcgaaaacgaatgaaatgcaccttttcccaaggtatttttgctccttctaattcagcctttaacagtcgatttaacataacaattgccaaatctggggttggatcaaacaatgaaaaaccacttgcatcatctggattttcaatccaaagtttcatagcactatctagcacattagctgctacagtacttttccctgcaccagtagttccaactatacatcccatttttttaaacacttcattcaatatctttactgtacggtttttctctagaggatgaactaacgttccgatttccaacccttcagataaaataccttcaggtaacattttctctccactttctaaataaagaatcttattttcagatacatcctctttatcacctttgatatttggaaggtgaagcaaattaacaagttctgatccagtccaagtcatacgcccgtaataaggaattgggatacgccaaatagaccgacgaaacgaacggtaacgaagttcatttacatcagccatcatactcgctatgatattccctaaaccttttagcattctgacaccaggatatacctcagtcgctacagaaacacaaacttgaaacgctgtttctttccctaaaaatcgttgcgttaaaacctttgcttctgttttctgaaacacatctaaatctttttctattctctttcgatcctttaattctgcttcttcttttttgattcttcttgttaatcgatagtctcgatctggtgaaaaagaaacatcaatccaagtcttttcttccattccacttataagctgtgggagtttatcagttttatactgggctaatgataaagactttttcgtctttaatttcattctcccgccaacagcaccaccaaacaatttattacgcggaaacggaatatcttctatattttgttctatgacctcagcgttcttatatacatttcgaaacgctttaactaaataagctaaattctcttctggtccacctaaataaaatcgaaccttttgactcttcccatctatatcttccggctgatacataagtaatctgtaccaatcgcgacccttccacaattgttctagtggttttcttccctcaccatgcacttgtcgaatcatatctcctaattgatctactttagcatcatcggacatatgaggaataactaaaacgtatttataagacttcttttccagcctatataaaacaatacatctagttatccaaaatatagtcccaataaatagtaggagtagactaacatgtacaacccttttcacaattggcacaatctggattaatcgatttgaaatttcgtatcttgtaatccaaacaaataatataccggatagtaataggaaaaatcgccaatgttttattaataccttcaacacggctttctccagttctttttcaaacttatttttagatgccactaactccacttcctttgcatcagctatgaagaattactctctcctttttaatgtttttcaaatacttttctaattccaaaagctttaattcatagagctgcctttttccatccttgtaaaaaccgcaatcaattagctgattaatgataagctgtttttttctatgctcataataagtacgattttctaaaaaaagcattgtttcgaagctttttcaaatctgttaaattctttttctgttatttccacgaatcggatatcccgatctataagatacttaatatacttttctcttgctttcatatactcttcttgatttccccatcttgtatgcctgccattacaaaggacgaaaaaagaagttaagttcagctgacttactagtttttcactttgatccttcggattaaaaatttctttcgccatttcatgcacttgtaatacctcatctaatgaataacacactacaaacaaataatgcggaattatagaacccacaccctcttacctccttgaatttacacttctaagcaaaaatcaaattgtaatataatcaagcaattgaactataaaataagtaaacactgccgataaaggtaatgaacatacagcaagaacaacaagtaaaccagattgttcttgttcaaagtaaaaatcttttattgtcatataaatagcaaaggtcaccaaaatgtacacgcaaacaaaaaatagtatgatttcccccataaatccgtacacttccttttaaagctcttaatttcgcattgtccaccttcatttttaacaaaattaaaattcgaaactaattaacgcttttattcaatatcgttaacttttagaacaaaatgactagtagattgataatctaatttttcttgatccattgactccactttttcttcaactaatctttgaacattatcactatttgcaccttcaggtatttcaacttcaacaaaagctttataggttttcgttacttccacttctatttgatattttcccatcttcatacgcctccatcttttaataaacttcaaataatataccttacctacaaaattaggaattttggtttaatttaattctttataatgcttcaattgtctttggtaacaacagaaagcaaacgacgcgatccccttagctgtcatttcatccgttatatcagtagcaacataaccagcaaagttatttgtatactttccatcttttgatgttgttaaaaacggaaatttagcaccgatataatacaaaccatctttatccacacctacatcaaactctgtaccatctgaagctttgtattgagttactctttttagctcatccattttgtaacacctccgttttaactttttcacctgaataatatattattctaggcgttttactcagccatttattaaggtcgttctgtcttatttcttccaaacatatatcataggattcctctacgccttttaagtctcgtttttctaattcccttacaataaatccccttacagcatatggatttaattcacataattctatgaaagtattatgaacaacttttagcttcccttcatcataaaatttcaaaataccatttatcatttctgcttttctttctacaagttcatattgcttaggtaaacacatcttatccctactcgctagtgaatttctaaatctactacaatagcatttccgctctatttcacacccttaccaaaacatttagtacatggtgttttttccatagattcatgtactttgaatcctctgattgagcatgtttttccaaatatcattcccgttccattgcattttttgcattttcgagtcttcaattaaatcacatcacttacctttaaatttcaaataacattaaaatgaatattcaattaaataaagaaagtacagcaattaataaaatcgtcccacataaggctgccgttcctacaaaaaagaatctagtccaaaaatccagtgcatcccaactagatgtatattcctctatttctttaatatcatctttcattttcactttcccctttttcactctcttccccatctcttcactcctttacagttctcatacacaaattagaaagagctataacaagaattcttgtagattccttacaagtcaacataattgaaaacgcatgataagaaggatgacctttttctaagtgatctgtgatatgttccaaaaaaccttccttttcttcgctttgcaaaacaaattctcttacatctgataacctagctttttctttatacttatcttttacgtaaagaattgcaccacttaaaaatgattgtgttgttcttatccatgttaatccagcaccttcatgaagtacctgttttgtcatttttctagcgagttcatacgcttgttttttagtttgaataccagcaatttcattagaaacgatcattaattccaccccttcattgttatgaaatttttacacaataaaacttacaacacctatgactacaacccaaaagggaagggcaatgattaagccatttttacatccttttgcaaaagctaaaggatcatcatcttgatacacttctcctgataaacgtttcatattatccctccttgaaatctgcttctactctccataaaaaactacaagtgacataacctattaaataaatcatcataaatttgattagaagatcaattattatagagctcccttttcgttcacctctcccattgcttgtaaaatacaagctattagtaaaagcggtattaacattaataaaatccccacttctcgacattttgtaaacatcgaaattcacccctattagaatagaactataaatagccccttccttaccttttcttttgaattaactaactccccatataccccgctctttcaagaagatatctatataaaaaggtgaaaatatatctcaaatgaaattgaaatattttcaccctttattgctaagtactagcaagcgatattgaagtctactaagaactccgatttaatttaaaccatcatttacttactattgaacattttctaaactgcgatcttaacttaaacgatatttgctcattctttccgtacacttcaagaccgcttattatctaaaataaacttgtcctacacctgaacgagtactttgtactgatacatcaaaggtacctatacctctttcaagtaatttaaacgaattatatttatacttccctttgatagtgaaggtaagaggttgattaaattgtacttttccttgtgtatattccatcttccaatctttagaatccatattactatcctttaacttttgatttactttatcgattacgtcaggagtaaagcccccatccctctctgctaaacttacagcatattcactaatttcattcgccttaacgttaacaactgtttgccctgcaaattctacaccaaagacaataatgaacattaacgacaagaaaaaaacaacatatgtaactgcttgttgcatgtatatgtttctccttcctataaattaagagaaaaggacggatcaaccgccctttcaactaaaaacttattttgaccatccagacggctcacaattgaaatattttcaccctttattgctaagtactagcaagcgatattgaagtctactaagaactccgatttaatttaaaccatcatttacttactattgaacattttctaaactgcgatcttaacttaaacgatatttgctcattctttccgtacacttcaagaccgcttattatctaaaataaacttgtcctacacctgaacgagtactttgtactgatacatcaaaggtacctatacctctttcaagtaatttaaacgaattatatttatacttccctttgatagtgaaggtaagaggttgattaaattgtacttttccttgtgtatattccatcttccaatctttagaatccatattactatcctttaacttttgatttactttatcgattacgtcaggagtaaagcccccatccctctctgctaaacttacagcatattcactaatttcattcgccttaacgttaacaactgtttgccctgcaaattctacaccaaagacaataatgaacattaacgacaagaaaaaaacaacatatgtaactgcttgttgcatgtatatgtttctccttcctataaattaagagaaaaggacggatcaaccgccctttcaactaaaaacttattttgaccatccagacggctcactcttcgcgccgccagtaattgaagtaaagtaattagatacattaaaagtacctgattttaatgctgggtacatgataactaaaactacaactgccattccaagaccaatgtaagtccatgaaactttatttgatgtttcatctgaagactcatttttcaaccattgttttgtacgagttaataaagctgaaaccttccccttacttgaacctttcaattctttcatttctaatgttttcataaataaatttctcctcttcttttaatagatttatttgattaattaaaaactaaactaactatctcttgctttatcaactaagatattgcaagaaatattgatttgaagaaaagcctgtccagaggtgacttgtaatacatgaaatccacctcctcgtatgataaagttaggttttttaggaaagggatttacctataaacccgtgagtatctagttatatgagatactatcgatgaaaatatctctgctttttctttttttatttggtatatgctttacttgtaatcgaaaataaagcactaataagagtatttataggtgtttgaagttatttcagttcatttttaaagaaggtttaaagacgttagaaagttattaaggaataatatttattagtaaattccacatatattatataattaattatgaaatatatgtataaattgaaaatgctttatttgacattacagctaagtataattttgtatgaataaaattatatctgaaaattaaataatagtataagtggagggattaatatgaaactaaagaatcaagataagcatcaaagtttttctagcaatgcgaaagtagataaaatctctacggattcactaaaaaatgaaacagatatagaattacaaaacattaatcatgaagattgtttgaaaatgtctgagtatgaaaatgtagagccgtttgttagtgcatcaacaattcaaacaggtattggtattgcgggtaaaatacttggtaccctaggcgttccttttgcaggacaagtagctagtctttatagttttatcttaggtgagctatggcctaaggggaaaaatcaatgggaaatctttatggaacatgtagaagagattattaatcaaaaaatatcaacttatgcaagaaataaagcacttacagacttgaaaggattaggagatgccttagctgtctaccatgattcgcttgaaagttgggttggaaatcgtaataacacaagggctaggagtgttgtcaagagccaatatatcgcattagaattgatgttcgttcagaaactaccttcttttgcagtgtctggagaggaggtaccattattaccgatatatgcccaagctgcaaatttacatttgttgctattaagagatgcatctatttttggaaaagagtggggattatcatcttcagaaatttcaacattttataaccgtcaagtcgaacgagcaggagattattccgaccattgtgtgaaatggtatagcacaggtctaaataacttgaggggtacaaatgccgaaagttgggtacgatataatcaattccgtagagacatgactttaatggtactagatttagtggcactatttccaagctatgatacacaaatgtatccaattaaaactacagcccaacttacaagagaagtatatacagacgcaattgggacagtacatccgcatccaagttttacaagtacgacttggtataataataatgcaccttcgttctctgccatagaggctgctgttgttcgaaacccgcatctactcgattttctagaacaagttacaatttacagcttattaagtcgatggagtaacactcagtatatgaatatgtggggaggacataaactagaattccgaacaataggaggaacgttaaatatctcaacacaaggatctactaatacttctattaatcctgtaacattaccgttcacttctcgagacgtctataggactgaatcattggcagggctgaatctatttttaactcaacctgttaatggagtacctagggttgattttcattggaaattcgtcacacatccgatcgcatctgataatttctattatccagggtatgctggaattgggacgcaattacaggattcagaaaatgaattaccacctgaagcaacaggacagccaaattatgaatcttatagtcatagattatctcatataggactcatttcagcatcacatgtgaaagcattggtatattcttggacgcatcgtagtgcagatcgtacaaatacaattgagccaaatagcattacacaaataccattagtaaaagctttcaatctgtcttcaggtgccgctgtagtgagaggaccaggatttacaggtggggatatccttcgaagaacgaatactggtacatttggggatatacgagtaaatattaatccaccatttgcacaaagatatcgcgtgaggattcgctatgcttctaccacagatttacaattccatacgtcaattaacggtaaagctattaatcaaggtaatttttcagcaactatgaatagaggagaggacttagactataaaacctttagaactgtaggctttaccactccatttagctttttagatgtacaaagtacattcacaataggtgcttggaacttctcttcaggtaacgaagtttatatagatagaattgaatttgttccggtagaagtaacatatgaggcagaatatgattttgaaaaagcgcaagagaaggttactgcactgtttacatctacgaatccaagaggattaaaaacagatgtaaaggattatcatattgaccaggtatcaaatttagtagagtctctatcagatgaattctatcttgatgaaaagagagaattattcgagatagttaaatacgcgaagcaactccatattgagcgtaacatgtagaattaaaatctacctaaatccagaaaaataaaagggttaaatatacaattcttgtaccaatattttgagtgattagatgtaggatgaaatttaattgtatgctatttaacagtagagatattaaaaattaatttatctatacattaatagtatagacatacaaacataagagagcattgtcttttcgtaggctacaatgctctctatttactatttatttttcttttgtatcttcaaattgacgttgttctaagcgttctattgcagctcgtcgtttagtatcatcaatgtttgtataaagagatgttgtttccatagaattatgtcccatttgatttgctaataatactaaatctttattttcattatagtgattagtagcataagtatgacgtaatttatgagggcttttcttttcatcaaaagcccttgtgtatttctctgtaagcttttgtatagcattaacagaaatttgcgcataggatcctttataatttgttacaaatagaatatcttcagcatcaggacacttgtaacgagcagcacgtacttttagatactcttgaacatcatctagggctgtttgtgtagccaaaatagatgattttttatctccttttcgtacaactttaatgtaacgagtacgaaaattgatactagaaatagttaaactagctgtttcagatacccgaagtcctgtacctaaaattaaacttagaatagcaatatcacgctctctatcgcgtttgaagaatcttaacttaccgggagcgttttcttttagcatttgctcatattcattagataaaaagcgcataaatttaatatcatcattattgtgaaaaataacttcagaaatttctttcgctcttgctgaagcgtcaattttttccttatgaatttccattttggccataacatttctataaaagtaacattctccattatcatcttcagtgtttttggttaggtagttaaataatgattttagagctgaaaatgttcgtataattgcctttgttttattaccttgtctctctaaatagcttttaaacctttttacttgtttaagaggaaggtgttccaatgtttcaattggcacctcatgtaatttcgtaaccgttacaacttctccatttacgaaaacaagacgagaggagatcaaccaatgtaaaaacatttcatattcaattaaatatccatacaaagtagcaggggagaggttcgttttctcttcaatatattcaatgatataccaaggcattttttctttatgacgttctacacgtgctttatacacttgtttttctcgattgctcaattttttcacctcaaacttcaaaacagtacattgattttctataatcaatgtactgttttgtcttaatttgtctaattttacattaaatacaattttaattgatattcttacgaaaacaactttatatagaatttccatttaaattaacttttaaaagtctttaatttattgcataaatatctctagatgctgcattgtcttttttatatgattatttttaaatacgtgttttttacgttcattccaactatggatataattgataatctcatcgaaatccattattgaattatttccatactttatagaccaatgtacagtagctaaaagctccataccataaggggtttcatatccttcaattaaattttttacctcttcaagtctttttaaagattcttcatcatgagagataaactctttagcttctaatattgcatcttcaaacagattaatatcagatttagaatttcgatcaccataaccacgaatataatgtccttctaaacgaattaaaacatgatttaaattttccgcatatggaccatatatatatttcacaaaatttaaacgaagaggctctccacactcttgtaaaaaataagctaatttctgtatttcgagaagcgaaaggtgatatcctggagctctgtattgctccattaataatagtaaaagagctcttgcttttgtcatttttggcttagttgtacctattttcatgctatttggatcaggatgaccagaaggttcatatagataaactgtagtatttaagtcctctaatgactttataattaaaggctgtacttcactccaatctaagcccccattaccacatccaagaggaggtaatgcgatcgattttatattataattaataatttcatttcttaaagaactaagcccactcttaatatcttcaattcttgatttattcttccaatgccttttagttggaaagtttataatgtattctggtgatcctaagaggtgtgttttatatataaacattttcccaggctgaacttgattaattttacatgccttctgataagctttaaaattatcagggaatgcttgtttaaattgaagggcgataccttttcccattacaccgactgtattaacggtattcaccaaagcttgtgcatcagcttctaacaaattgccttttgttattttaatcaatttctaccaccaccttaataataccaattaggttttaatttaactgttaaagaaacattatgttcagttaatattttttcggtttcttctttatatttttgactatagactgcaatcccgataatacagtcaagtgggacatattggtaaaccagaaactctgccattcttctacgctttctatcattgtcttcaatcgtgtcatgccaatatttactcttcattatatcccaatcaatgttgtgcaattctttaagatcattgtaatactcagtgaagtgcattattccatggccatcagtaaaacaaaaaggaaccccgttttgctttattttttgcgctgacgatacaaaataaatgagaggcccttgcccctcattatattgtgtgacattacctttatagatactgtataacataggtgattttggagcgaaatagaatggaacatatttatgtaatgttccaaatggttctactggaactgagtaataagctcgtctgttttgtatatcattattagcaatattacaatatgtttgcccattattcatgatgctagagacacacacgagtccatttgaagataatatttttgataaatttctataatgagtcatatgatatataaatgtgtttgaatgcattatgtacctcacgatattaacgtttaattttatttatattataacacactataattatcaattaaactcgaatttaatgtaaaattatttcttaatcattaacaattcatacagcctgtatatagcctccccctttattctttcatgtaagtttcttctcacatataacacgttcatgctatgaatgtgtttcataaattccattattacatatatgaaatttgatttatgctcaaaagaggacaactaaattgaagtgcccccgaaagttagacaggtcgtttcattaggcagcctctagggtatgagcccggtattgtaccggactcataccctttaattttgccttaattcttttatgattatagtattctatatactttgctaattcttgtttgaaatgtgttatactttcaaattcttttcgatacagaaattctgatttcatgataccgaaaaaattttcaataacggcattgtcataacagtttcctttgcgagacatactttgtgttatgccacattgcttaagagaatgacggtattgtttcatttgatagtgccaaccttgatcagaatgaatgaggagtttgtcttgatctgttacacgttcaaaggcttggtctaacattgttgaaacaagggaataggtcgttcttgaaccaattgtatacgtgataatttcaccattaaataaatctaacattggtgataggtataacttctccctaaataacttacactccgttatatctgtaattcatttttcatttggtttgtcggcttggaagttgcgatttaaaatattcggcgcaattttcccaactgtccctttgtaagagcgatattttttcatacgaacaaggcattttaaccctaattctttcataaggtgatacaccattttatgatttattttgtgtccacgattcatccgttcatcataaatagcttattacttgagctttgtcttgtttggtgattgtttcttgttttgaactacagcattaaacctttttaaatatacattttccgcttgtagtgtttctattgagccttctactactggttttatttttttatctttcatggatggacgcccctttttctttgaatgtagggcatacaatcctcctgtttcataagctatttttcatttccgaagtgtttcataagacggaatattggtaatgtctctataaagggataaaacattcttcttatgtgcccaatcaataaaataatgtcatacatacattagaaaaaacacacttggaggcgattctcatgtcaagaagaagattttttgatttacgcgaaggagatcgaattaaagtattctcagctggtatatttgagggcgaaggaatctttattcgcttcgctgaagaaaaggatgaagactttattttttgaattaaaaacaatagaaatgattgtgacagagaacggaaatgtgatcgtgaggattactaatattgttctataatttctcataagaaagcttaggaacagctgttaacaaatcatttacgaatacaattccttatccctgtatttaatgatgaaatgaaataaccattttgtcttactattttattggaactttaagtccatagatttatcctatagaaattattgtctacatgtagcacacttcttttgtaacccatcccctgaaacggtaagtttaagaattttctaacacctgaaatttttatctagaaactcttgattatcacctgttattatccggatatcttgtatggtaaaacctttttcaaatgagaatgaattttattccaattcctcttcttcttagtactgttacaaagtttttaaatatgaaaagctttaggttaacttgaaatgatttctcccatatttcatccgatttggatataaaaaaataaagagggtgtctcagagtaagaattttactactttaagacaccctctaatatccataattatatatcatttagttccgtcaatatgtttaagaattttctattaaatttatgatagaataaaatactaattgtacattcactcaaaccttaataaagtggtggaagattagttggcacaaacataatattcatgagatcaaatggagtaccggagtttaatgtcacatttatatctagcgttacattagtattatcacttgctactatattaccgatattaatatctgaaaaacgagctccattatcattaactccatcgttatttgtagtggtattaacatttgaaacagtataaactctaccgtttatagtaactcgaatagttgaatttcctattgaagatactcttaaataaagattgtaactatttccattccctctaagcgtataacgagctgtcgtgttgctttgttcaaatcttaaggaatcaccttgatttccaaatttttcagaaataaatgttcgagtttgattattcacttgagtggcatgtattggcgatatagtaaatcctgtataatcttctggcgccaaatggatcatagtaccattttcattagcggcatagatattattttttctgttatgcacagataccaaataggcccgtgctccaccaggtgttcccgaaggactttctatatttcttatttggttatagtgtaacggtcttgttagatcttcgtttctaataactaaaggaaccccagaaatattacggataaaataatctgggaaatagtttgaatttccacgggctgaaaaagcaccacaccttaaacttaaagttgtttgaaaggattctgtctgccaattcgtagaggtagcaacgccctctcgatctgtacctgaatccagccaacttctaacaaatggtgttgataaaggagggaggaccgtgctgcaattaaagttgtgattgagattagtcgcccctatgagaccagatgaaactcctccgctataattaaccctggcactattcaatgaatgagttgtagtactacccggtaaaccaccaatattagggaaggtaatagaaagcctagtaccactaataccagataatatataattcgaattaacttggaaaagagaatataaaaatggccagttttgtgctgtaaatgattgtgtctgctgtggtccactaccgctagcatataaattagcgccagaagataccataagactctgatatttaaacaatgaccaaatggatacatattcaaatacatttaaaaacatatatgttctaaattctaacatatcgtgtaaacgggtgtttaaccctctaaacgcagtttgatacgtatttatacaataattagaataatctcttgtataatttctcaggtaatctcgatacgtacgtaatgttgctgctgaaataccccattcatctgcattaagaataacatctctaataaaagaaagatgcatattggctgcctgtgcaaataaaggtaataataacaactggtatccttgtatctggaactggggtaatctatttagaaataattgctgcattgtattaaccgaagaagttattgataaaggaacagggttttgagtagggtttaaaaaattatctacttgttgattaaactcccttatattcgcttggagccctatcaattctgcatttacacgagcaagggtatctgtattaagtctttgatttaggaattgttctgtctcccttaaaatatcttgcattagatttgtactaccactaggaaatattatcccccataattcactcaatatcctttttccaataagactccccactttctttagcaaaaaactagacacagttccgactacaggagctacatataaactatgatctgttcttttccactccatccattctttttggatggtatctaatgatttatgttcaaaactaaatggatcatgggctactacattatacgcatcacaaatagttgttcttccactattcaatacattattcatataaaattcctccttaaatatctagttttatattaaaactaaactcttttgataataacgagtatgtttaagaaactacttactacttactacttacaaccacaatcacaattctgactttgattatacgtatcaattaaatcttgtgtgtatacattcaaatcttgtgggcatacattctgactttggttatacgtatcaactaaatcttgtgggcatacattctgactttggttatacgtatcaactaaatcttgtgggcatacattctgactttgattatacgtatcaactaaatcttgtgggcatacattctgactttgattatacgtattattcgtgtttattatttctacactgatagattctaaatttgtatatattttatttcctttatcgtttctccaaaataagaatgattggttttcaattttaaagaggcatatatattttccttgtcctttaaaatccccataagaatatatattaattaattcatcttcacatacattaggaaaatgatattttagcataaaatcttttcctcctattaactatttttatcgtgcatagttaaatcctttggatactattgaattattaagataactagctaacatctatacctatagtttttcactttcaatcctgataaagacactatagtgtatatttaaattttttataaaccttcggttcttactcatacacaaaacaaaaaagaccagatatttgagcagattggggattttctttcatcaatttgatttgtaactcacgtacttgaatatgatcaccatcaatgacataatgtggtaattgctgcacactatattttaaaatatggtccacatataccgtatcttgaaaacttaaggaaatagatggatttctgtccaccgttgtatacatgttttcacacacaatgggttcaatagaaaaattcccgataaaagaaaggactcccttaatctttaatacttgtaagtcaatttctacttgtccacattcatcaatctcaatacgttttttacacgtatctttcgtcatagacaaatgacttacatcgtaaacaagtttcaaatcattcggcttttcaatttgaaaacctgatggaagggaaacgatacactgaaaaggtatatggtgtttatgtttagttatcccattcggaacatctctaccttcttgcgattcatgcatggtattcacccccttctactttcatttatgggtttcaagtacctctaaaaccgctctgcacattctatgtggggagtaaacggtatatgccaattattcatcacaatattttcacgcctcccatgttacattttgatgactgtacgttgaaatatacatatcatatacgaagcgtactttttacgagtcacgttatccgtatgcatatcgtccattcttcatctgcctacttttctaggagaatcatgacaccttaaacagggtaataactctttcattgctctaagaatcaacatcatatttcttgaatttttttaagggatccattcaccgctttcttaactacttctgtcctcctcctcatagattaacaggtgtaattagagaatccatttattaaaggcaacaattgtttaattcattttcacacaggttgccccctattccattgatgaaattgaattcaatcacctgttaactcttttcctgcggctttgagtaaagtatatctctaatccaaaaagaaaaagcatagatatcttcctctatagaggaagatatctatgcttttttataaatgaaaagtgctacaaatatcataaatattcaagataatcgcatagaaatgcgttattttaaattttttgttctatatgtatactatggttgtatctttttatgaggaataagggatattattgagagataccattggtattgcaggaattattttggttactaatatgattacaagtataaaaacgattagagatgtgtagaaaacaggtagatacaatacaaaaaagaatttccctgcacgttttatgagtaaaagaatttactctttatggttaattttgaattaacgttcgaaatgaacgtatttttgttgactgctatattttttattcacctcatttaggaacagtaaatttaatatattttaaactaattagagttatatcaaaaaaaacttaaacatttatttcgtttgatttcagacctataatgacttttgtttataattcactaaaataattaaatcttatgcactatcttcaccaatattatgtacaattgaaaaatatagatgtgcttgattatttttaatctcaattgtacgcatattttatatttgttgaaaatgagtagaaaacttgatttgttataatagcaatcactataaaggagtatttttgctattcgctcctgaactaattaatgaacgattattcttaaaagctatggatttcacataaatattatattttttacttgaatttgatttagcaattacataagggttgtgaaaaattggtttatatgtagttgagacatattgttagtcgctctaaaatcttatagcatactgttttctgtattcaaagcattttgcattgaatgcatacctcagattactggtttatttctcatgtttatataatctacatttgcctagggatttgcaccatattttaaaatagaaaagctttagcccaatgtactcaacgttttttagtttgataaaaaaatactaataatctatataaggtaaacttatcattaatatatatatatattaatgatagttcaacaagaggagtcaaataattttgtgaatttaaaagttataagagagaaaacttcaactatttgaaatagaatgatcggaagtatgagtgacatattttaaaggcaaatagtaagaaaatagaatgaaagtgttcgttgattactagcttaacggattacaattaaatggaacaaatctttgttaaatcagcaagttgttaattgtttatcatctgcacgaactttaaaaagaaaaagaactatacaagtttaaaatataaataaagccacaatctgtatttggattatttaaaatatatgatctgtacgatgggttccaaactaatacaatgcgagctgtaaaaaatctgttacaacccgcattttgtttgtaaaaagacaatcatctcgaaaacaaacgacttattatttttgatgtctttttttatatttatgtcttagttatataaaatataattaatttcgttctttgaagaaatccctaaagagtatctcaaaaaggctctaataaacttgttggaatctttttattttttgtttgcaaaatgctcttttaaattcttaatccatatagattgatgtaaattagtattaggaatccaattccctgattcatgagaacctacaaattctctatagatgggatgccaaataacaagatagacttcatttccatattgtacttcatcaaattgacgtaaaggttttccaaattggtcggattggccaatagaaatcgctccttggtctagcatctctttaaattgcttcaaacacatcatcctttataatattatttttatgtatattttttaagtatgttgatattcttctatagaaattttaaaacaaaaagagaaaatcatctaaaagagcatattaaataattaattctattaacaattttttaaagaattatcctatataatttttgtgaaagaaataagcatacgatatccaattcttacaagggtaaattaaattgatatttaagcatagaaggaaacttactagttattttcaatcatttaagcaacttcatttttgggcacaatgttaatgtattgtacacattataaatgataataaggtctggattcattgtataccatgttttttaagtctactaaattcccccattatttatcttcttttttattgtgttttctttttccacctaaagtttcaactgcattgattaaaggttgtggaagcggaatacctatacgcccagcattttctgagatagacaataactcatttcccacgaagaaaaagattgtggcttctcgaatggcgctattacttccaaatatcatatctaattgagttgcaacgcctactagaagaaataacacgacctttttagcaatacctttaaagccaattttgctttttaattttccattataacctgcagcaatcattcccgtaatgtagtcaactgagaccatagttactaagatttttaataatacatcccatgcaccgaaaaagtaaccgcaaaaaccaccaaaggtggctagaaatgttttcactaatacagcttcattctctaacattctctacactcccttctactatattattaatactcaatgtatactctcatgcatgtataaaggacataatctgtatccactattctataaatttttaagatgccagaaatccactttttttatgcctatcttttctcttcctactcaggctcatgcacaactatagtttagactacatctataaataaaaggatatatctcttttcatatatgcatgaaaaattatgtttacaaataatggacctatttttaatgttttttaatgatatatctcaccttcattaattccgctataagcccactattcttgtactccatagacttagttagaattagtgagtaaagtaagattccaactaaattattgtgaatttatatttttatatacccaaaatccaatgcttttttacgtatttttaggagtttattaaaatttatcatattgtgtacatgtttatgtgtagaaaaatatacttattgaaaaatgaaattctattactaacaagttaagatagataaatttaaaagaattaaagattgtggtattttaaatgaaataaattattaaaaagcattatattgtattgaaaatataaacaaaaaaatcactattttggatgcttctcttaagcacccctttcatcatataaataactaatatgccatcctaaaaaatcactcttattttgtatagaggttatttttttcgtttgtttttaaaatcctcattctaattcagctataaaagaggaaaaagtatatcttttgaaaaatatatacttaaacttatccgaaggagtgtgatggtttttgaagcagtttaatgagattttagaaaaaggagcaatacccaccggacaatccaatatagtaggaaaagcgttatgtcaatttgatgaaatataatataaaaatgagacttacttaattgtttggtatccccccctataatgaatttatcggttctcataaaacagggaattggatttctcatactgatctacatcaatcagtttggataaaaaatttaaaatcctcttttgttgcgaaaagataaagaggctctaacaattttgttagaacctcttcttaatactgtgtagggatttcgcaaaaaatgaaggtaaaaatagtctccttataaataactaaaacatacatcctaaaaggtattaaatgctttttgaatttacattacatatgctgcatagacccgtttattaggctttcactaaaatgcaacttcatttcggaagcactataacacaacactctaatacattaaaaatattcgttgaatatctgtataatattccgaaaacataatattatttatttaaaaatattaaagtctgtttgaagaattcgatggtattgttccgtattaatttctttttttattttctccccatattgagtgtgtgtaaaactttgttttgtaagtgaaatatgaccgtttttaattaatttacaaattatatgtcccttatttaaaggagagtctggattcgttataataatgttttgtatatcatttactttatcttcattgattttttccaaagaaaaagcatatccaataggccaattatgactaggttcagaaccaaggaaatgtgaagtttctccattttttccttttctcatttctaatacataggtacctttagctgtactttgtttacgaacacgatactctccagttggagacttaatagtatcaccgttaaagggaaccggatgtaagggaaggtgtgaagcgaaaccagcatctagtatgtagttagtatttttgtgttctaaaatgattattacgtgtccgtcatcaggtttccattttttttattttgggatcataaagagtacccgctattcgataaacattaaattgacaatcacttaaaaaataatataataacgaatttagctcatagcatacatagtccgccatgattatttagaagtaatttttcttcaagatttactcgagaaattttttgaggatgtccttccataatgtctatgttctcgcagggtattaaatgtgccatctgtaaaagaatttgatgcaaggtatcaaattggatactttcttttgatgaaatctttaattttgagaggaaattcttttgtaattcagttaacatgtaaatactcctttcgtttgttgaaaaaatatacatcaattacgctccagttgttggtttttatattattgaagtattctaatttttttcttttagaaatgcaaaatatgtataggataggtgaacgtcctattaatatgcagataaaataatattaatgattcattcattttaaaggtggcaatcggctttcaaattacattacatgattgtaactgatatcaatctgctaaatagcaagattatacgcatagaagcttcttatgacaggattactcttgaattgatggatatcattcataaaaaagaagagtttgtaccaactcttcttttttagtattctaggctattctattactttttcaacgataggtgacatcgcaataggtggaagcgacattgtcattgctttaaaataaacatctaatttatctccgatagtataagaattattatctaaagttggaacgagcaatattttatttttgttaactaaatcccaccaattttcttgatacaatagagctttttctatcgttggtgtatccacaatcgtcatataattactatcaacagaaacaacataacctgtgaaatgtgtttgcagttgtttctcaaaagacgagatggaaatatgatttgtagaagtttcgttcgatgcggcagaagcaggtgttattccaaaagtaaatccagagcctaatgctaaagtagttgctacggtaactagcttttgttttactgtaaacataatcaattatccccttttctaattttttatccctacatgtcaatattaccagttaaatggcaagaaaacttcctaaatcctatttttaacaaatttgtcatttttataatagtaatttgcattttcagtagtttttgatagaggtttatgctatggcgatttgttacaaaatttaaagaaatgagtcacactttctcaaaatagagaaaattatcacggatattacctttatgtaattttagaatctatctacttcctaaatacccctaatcattccttaagttttctgattttactttagcagcaaaatgagtgttcgattagggtgaggactacttcaagctgtaccgtcagaatgtatccttgtaaaattgatatgtatgtgtttgctatttttgtcaaattttagcatggtatcaatcgttgcttttttatcatcatattttactttactatctgtcataggagtaaatatttacattctctccccgttcaaacttctaattccaccagcatagtaccagcagaatgcctacctactggaacaacaatcttatataagtctcctaaagttatattttgtccatacttgtgccatttagattagcgctttattaaaccgtttattctgtacctcaggactaattaaaatttcatttgacgcttctagtccattatattctaattatggatacaaaaaaatggtatttaagatttaacaattcatgagtgggaatgcccaattccattagagttcgatagaactttgtgcctaagaatctttcacttcaaactacccatgaagacgttacgtggtgagttgttcagcaattacaataaatattataattaagcaacaaagaattatatgataaaaaacgaattactataaaaaacttttctgtctaaaactaaattatccttatcaattgcctatttaaaattactatattaaaattactttatacgttatcatggaaaggctttcatttttattgattccgtgttaacattatatctataaaaatcttaatataatttttttttattgtgagagaataatattttttgtccgaattaaattaatagctaaaatatcaatttaatttcttaataaatagagaactagagtatcagattgtaatagaatggatgattttatgttatgttgatggggaataataggaggcacagcgtgcgaaatttctttgaagacaagtacataaatgttgaacttaaaaggcaattaataaacttaattagcgaaattagtgagtataaaggaaagttagcttcttatcaagaacagaggccagacatatttaataatttcgaaaaaattatacctctacactacatgaaaaattatactactatttatacagataaaaaaatttcaaaaaaaagaataaaagaactcatttttaataacaaggtacctgaatctgttccggaagatgcgatattttgttactatcagactctggctgttgtacatcaaaaatcttgcactttatctattagtccagaaactatacaagaattacattttcaagtaatgaatttttatacctcagatagtggaatgtggcgtcaaaaaccactttctataccagaatttaaagatagcggaatacacataaccaattaccatccgctccctcatgaactgattccacaaactgtagacgacttgtgctaccaatacaatttattatataaaaataaagagctacattcacttttactaattgctcgatttatattgagtttttattgcatagtcccttttagccatggaaatggtagacttactcagatattaatgcatttattattaataaaaaatggacatacatttgtaaaatatgtttgtttagataaatatatcaataaaaaacaatcagaatactacaatgctatatgtaaatcttcagttaattggtattgtaatgaacataatattagtttctggttaaaaaatttcttaactattattttagaggcatataaagacttacacaacagaatacaagattctatatgtaatcaaagtaaagttgaacgcattcaaaattttgtatacaaccaaaaacagccatttactcaagaaactatcagtagcatataccctgatatagctaagagtacaattagtaagacattaaataccttacaattatccggcgaagttaaacttgtttcaaaaggaagaaatgcacattggatgaaagtctccccataaatcaaatagccctttccccatataaaaaggctataatattatttctcttctaattgtttttaaaatccgatcagaccaatatactatgcatgatactggtctgattagatacatgttttttcagttttttctctttttagctaagtaggaatgggaaaaatcactctatattacattgagtttttgcttttctttacaaaaaatactcattgatccactaattaataatagggcacctggcaataaataaaagagtgtgatacaaataacaccaccaatagcggcaataatcattaaaaacccacctattttagcattaaatgtaacaattaaacaaccaataatttcaataacagataatataatagggagccaatttaaaacgattatcccatttgcaccttctactttgagagtcttacttagattatcaataaatatagtaaaaatgaaaaataagatacccataattccaccggtaagccctaatatgaaatctgttattcttctcaagattaacacttcttaaaatacaatattatgggaagttattctattgagagtaagatacaaattatttacttttatagctatctttacaatggtgagatataattttatgctttctcactcttaaaacatattgcaaataaagtgtactaactacctcaagtgaattcatatgtgctagtttaagctagcctctttctaaaattttatcggagtatttgttcagagaaatatcaaatacttctttaaagatccgtttatactcttctctatttatggtacgtttatttttttccttttctaatttctgtaaaactttatttagtaagtaaaatatgtccatcttcaataaagtcttcatgtcttgaatatagccaagctgtgttcttatcttcttctgaaataacttctttaagttcgcattctaatcttttgaactttgcaaaaaaagtcctcgaattcttgtcgttcaatctttttattaaagtataatcttcgagattctagatacgtgctatgagcattatttacaaattctagtgctgttatactttttatcgttttctttcttagttacaacatcatacgctgtacaaagatcactatatataagatgcaataaatgttttaactcaaaaacgctaaatctataactagtatccataattatctctccaactttaaaaatgataattttcgcatcttgattccattataacaagaggcacatcgttcccctactaaatttatgctaatgactatttatcaacgattgttcatgagattttagtttatactttaatgtctttctataacgttattactcaatattaatttcttctaaaactatagatggattaacaacaaatataatgaagtttaagtttgtagtatgtatcagtattctattctttgaggaagatggagttccaatataaacaacatgatcgagcttgttatgaggaacgtcatttgtagatatagtaattatatcttttaaagggatggtaatctctgctgattgccatgcaatcattatactatcttgggactttgttatgctaattcttgacattttatatcaatcctttattagttttagataaataattaaccaattatctaaattactttaaaataaactttatattattatatattaatttaaataatttatgcttatgtatgcaaaattgcatgtataaacttcatattcccataaaaataaactatattaaaaccgatttgattactattaatcaatttcatttcttttcaatttaacagtaattaactaaaaaaagctgctattctatttgtgaattaaataagtcttgaactaccccactttcacttcgtttagaagtgagggattcctaagtaaagagttctatcgaactctaattgattaggctaaccccgcagtccttgcggttagaagccttatcgcttcattttttagattgatacttgcgttaatatccctatcatggtgtgtacaacaagaaggacagtcccattcacgtaggtttagatttttaacgtctttattttgatatccacaacaagaacataattggctggaagcaaatgttttcggggttcagccgagatacgtgtaaaaatgggtcatagactggtttttatttccatgttatgaccctattatcttttatttctagctagctttttagaaagaataacgttttttgacacttgggggtagtgcaaattcttaagttgatgggcatgtggccatgcccacataagggcacagtttactctttcccatctaataaacgaccaaggccacctaatacactaccttcgccagtactttgcgctgctgggcttgtaaggcgtgctgctaatcggctaagtgttaaggactgaatccaaactgttccaggtccttctaacgttgcgaagaataaaccttcgccgccaaatagagctgtttttacttttccaacgaactcgacatcatagttaatgtcttttgtcatagcaacgagacaacctgtatcaatgcgaagtttctcaccaggttttaattcacgtttatatacagttccacctgcgtgcatgaaagcaagaccgtcaccttcaagtttctgcatgatgaaaccttcaccgccgaagaaaccagttccgatttttttcgtaaactcgattccgatagaaacgccttttgcagcacaaagaaatgcatctttttgacaaactacttttccttgatattctgttaaatctacaggaataattttacccggataaggagcagcaaaggatacgtgacgcttaccgtgacctgtatttgtaaatacagtcataaacatgctttcgcctgtaacgagacgcttaccagcgcccattaattttccgaataaacctccagatgggccagaaccatcaccgaagattgtttccatttcgatgtaatcttccatcatcatcattgcgccagcttctgcgataacgctttcttctggatctaactcaatttcaacaaactgcatatcatcgccgtataatttatactcgatttcatgtgcttgcatttttttcacctcgtatgtaatagatacttatattgtacagaatttaataggattagaatactttagttttgttaattttcaaataaagtggaacaaaccaaaactgattatcagctcccgccaatcaagctgtccgcaaataccgggctaaaatatgaatatggaaattcaacattatattaaaattataaaaaaatggtggaatgaaagtgttctcatttgacgttttggatatagcgtgatatagtgaaatcactattgagctacataatgtggtacggaaataaagcacgttgaattaaaggctgtaagcttgttatacattcatgtcctttatatccaccttttcatgtggattcatagtttcatttttatttaggaggtacatgacatgcaaacaggtaaagttaaatggttcaacagcgaaaaaggtttcggtttcatcgaagttgaaggtggagacgatgtattcgttcacttctcagctatccaaggtgacggattcaaaactttagaagaaggtcaagaagtttctttcgaaatcgttgaaggtaaccgtggaccacaagctgctaacgttacaaaaaactaattagctagcgataaaaagcattccgattttcggaatgctttttttttattctttggaactcgactcatttgaagataattcgcccttaaaggtacgctcttcaaagtcatcaagcatttgctcatattcttcatgttcttccgtagcgaaaacttgcggattttttccatacatatctgtaccaataaagttttcgaaatcctctacgtagcctacgttttcttcactatttacgtacatgccattatagtttttcgaatcttgtctttctaaatcagatggtgtttcagatgttccgtaattagcaacatcttgccatgcatcttctgcatcatattcaacagaacgatcttcatcatgtttgtggaaagaaggagataacacttcttcttcgactggtcgtgtattcatatttagcttatttgtcgcgtgctggatgcatgttgtagcagtcggcattgcttctaatctttcaaatggaatttcttcgccagacacttcgcaaatgccgtacgtacccgcttctattttttgcaaggcatgtttcgtatccgctagctgtttatgccaaagttcaataagcccgaagtctttttcacgttcatatagctctgttgccatatcagctggatggttatcatagctagataattctccaacagactcacgttcagatgcacgatcttcattttcgtgtgtttgtatcgtttgctctagttcgtgtttttgtttttctaaaacggatttaaattgatttatttgttgtggagttaacatagtcgtccaccttcctacaattcagtttctttacatagtatgagcgttgcgagtaggaattatgagatgaatttcagatatgaaaaaggagccgcataagcagctccttttatagaaagtatccaagtaataatccgattcccatgaggagaccgaagatcgtatttgtttttgctgttgcaatcatcgcaggtaccatttccattggaatgcttttgccgataaagcctttcgtcgctttaaatgctttcggtgcacttaaaaatacgataagcatccatggtgatacgatgcccacgataattaaagcaattgtccaaatgtaggaaacgatgaacatagaagcaagtacaccaaccgctctttcacgtccaacgagaattgctaacgttttacgaccgttttctttatcgccatctaagtcacgaatattattagctagtaaaatggcaccaattaaaatggagcttggaatagatagtaaaatgacttctgatgttacagttccagtttgaataaagaatgaaattccaataatgataacacccataaataatccggctgttaactctccaaatggtgtataggcaatgggaagtgggccacccgtgtaaaggtaagcaacggccatacaaacaagaccgattgcagcaagccaccagctagaattcatacaaatataaacacctaatagtattgcgatgccgaaaaatccaaatgctaagttaagcactgtttttggctgaatgccatcgcgaacgatagcgccgccgataccaactgaaccttcgtgatcgagtcctcttttataatcaaagtattcattaaacatgtttgttgctgcctgaatgagaagacaagcaagaagcattataaggaaaagagggagatggatttgatttatacctccgacctgcattgcataggctgttccgatgaaaacaggaacgaaagctgctgttaatgtatggggacgtagtaaactccaccaaatgcgccagcctgtttgcttgcttggttttggcgccgtaggagaggaattcgtttcgacgttcatttccatgttgaatcctcctttggtcacatattgtacacaactaagtgtagaaaaagcatcatttagtgtcaacgtttattttctaggaagagaaggtgaatttctcagaaatgctaaacgttgacaggcctttcgtttgaggtgtatcttaaaatcaagcgtaattatgactatttttcgcccataggggggagacaattgtgattcaaacgaaacaaaaaggcttgcaagaagttcttagtgcagccattaagcatgcaactgatgaaaaaatattggttagttttgtaaaacaaatagactggatggatccgcttctgttttatgcagcaggaaaaaggattgcattggaaaatagatgttattttgcagatccagctcagcatgtaatatttgctggaattggctctgttttcactatagcaaattcttctcacaaacgctttcaagcggctcgtgacgagtgggataaagtaaaagagaaagcatttgtacaaagagaaaaatatgaatttggaacaggtcctcttttatttggtggattttcatttgaccaagaaaaagagaaaacggacttatggaaagaattcgatgatacgacattttcactaccagcatttttattaactgtaaaaaatgaaaaagcatggttaacgatgaatacattcgtttcagcaacagattgtgcagaaactctttataacgaaattgtttctttagaagagaaaatttttggggagagtaaatgtgcattagaaggattgaaattaacagttacttctaaagtggaagtggatccgaaaggctggatgaaagccattaagaaagtgcaagatgagatgaagcagggtaacgtgcagaaggttgtattagcgagggagctaaaagtagaaatggatcatcatattgattctgctcttgttttagaagcacttcgcattgggcaaccggattgttacgtattttcttttgattataaaggagcatgcttcttaggagcgacgccagagaggttaattcgtaaagaagatgagaagtttacttcgatgtgtcttgctggttcaactggtcatggtcaatctatagaagaaagtaagcgaaatagtaatgcgcttcttcatgatgaaaagaatttagctgaacacggttatgttgtgaacatgatcaggtcggtattaaatgagcactgcgaatacgttaatattccggagagtccaggtctattaacaacgaaaaacttaattcatttatatacgcctgtagaggcaaaaggcactgcgagtcttttaacgatggtagaagaattacatccaacaccagctcttggcgggacacctcgtttggaagcgatgaaactgattcgtgatgttgaattgttagacagaggattatatggtgcaccgattggctggatagatgatgaaggaaatggtgaatttgcggttgcacttcgctgcggattattaaatggcgagaaagcatccttatttgccggttgcgggattgtaattgattcagtaccgcaacttgaatatgaagagacaagtttgaagtttagaccgatgcttggtgctttggaggaattaatgaaatgaacaatcatatagaagcattatcatattatttaggcgcgttcgtggatgaactgacgcgtctaaatgtatgtgatgttgtcattagtccaggctcacggtcaacgccgattgctctactaatggaacaacacgaaggaatgaacacatatttacatgtagatgaaagatctgcaggattttttgcgctcggtatcgcaaaagcgaaaaaacgtccggttgcattattatgtacgtcaggaacggcagcagcgaactactatccagctgtatgtgaagctttccattcacgagtgccgcttatcgtcttaacagcagatagaccgcatgaattaagagatgtcggtgcaccacaagcgatgaatcaatttaatttatacggtacgtttgtgaagcaatttacagagatggcacttccagaagcgagtgaagcgatgtaccactacgctcgcatgacaacgcagcgcatgatagcaagtgcttgtttagcgccgcaaggacctgttcatcttaattttccagttcgtgaaccgcttatcccggacttttcattagaaagtttatgggataaaggacgcggggaatatacagaagtagttcagcaagggaacgtggtgatgccgagtgaatatgtagattctcttgtagggcgcctttcacatatggaaaaggggcttattatttgtggagatgatagtcattcagaaatcgcaacgtttgcaacgcaactagctgaaaaaacgggatacccaatattagcagacccactttctaatattcgtagcggacaccacgataaaacgatggtaatcgactgttatgatacatttttacgaaatgaattgttaaaagagacgtggaagccggacgttttaattcgttttggtggtatgcctgtttcgaaagcattaacgcagttcattaaaaaacaaacgaaagctgttcatatcgttgttgacgaatctggacaatggagagatccagctcttgttgcgacagaagttgtacaggcaagtgatattgcattttgcagtacattaatagaaaaaatgccagttatgaaaaagaatgattggtcccaaatgtggcaacatataaacgaaaaaacgaaggaaacgcttcgtgaaatggaaacatatgaaactgcatttgaaggaaaagtcattacagatattgtacgcgtattaccagaaggagcaacgttatttgcgagtaatagtatgccaattcgtgatacagattcattcttcttcacatcagataaaaatattcaagtgatggcaaaccgcggtgtaaatgggattgatggcatcatttcgacagctttaggagcgagcatgatttgcgatccgctcgtattagtcatcggtgacttatcattctatcacgatttaaatggactattagctgcaaaattacatgaattaaatataacgattgtcgttgtaaataatgatggtgggggtattttctcattcttaccacaatatgagaaaaaggaacacttcgaatcgttatttggaacgccgattgggcttgactatgagcatgttgttaaaatgtacggtggttcatttagccgtgtaaatggttgggagcaattccgggaggaagtacaaaagggagcaacgacagaaggtttacacgttgtagaaatttgtacgaaccgtgatgaaaacttaacgttgcaccgtacgttatgggcaaaaacacaggacgtaattactacatcattgcaaggtgaatcaaaatgaaagtaacgctgcaaggtgtatcgtatgaatatgaagtagtcggaagcggggaaccacttctacttcttcatggttttacgggaagcatggaaacgtggcgttcttttatctcttcatggagtgggcagtttcaagttattgtagtggatcttgttggacacggaaagaccgagagtcctgaagatgttgcgcattatgacattcgaaatgtggcattgcaaatgaaagaactattagattaccttcatattgaaaaagcacatatacttggctattcaatgggcggtagactggcgattacgatggcgtgtctatatccagaatatgtacgttctcttttattagaaaattgtacagctggactcaaaagtgaagatgagcgaaaagaacgctgtgaaaaagatgagcgacttgccgataaaattgagcgagaaggcatagaaagttttgtatcgatgtgggaaaatattccgctgtttgaaacgcaaaaacgtttagcaaaaaacgtacaagaagcggtgcgaaaagaacgacttgctaacaatccaaaaggacttgcaaatagcttgcgcggcatgggaacaggggctcagccttcatggtgggatgagctacacaacttgaaaatgcctgttcttttaatgaacggagagcatgatgaaaagttctttcgcatattaaaaaacatcgaaaaatgcgtctctgacgcgaaatttgtcaaaattgatggtgctggccatgcaattcatgtggaacaaccggaaaagtttgatacaatagtaaagggatttctaaaaactatgcagtgatgcttttttcagttaagaatgaagttacacttatagatgagatcagaaatatacaaggaggtagttgtaatggctattgaatgggtaaaagaaggcaattacgaagatattatttattcaacatacaatggtatcgcaaaaatttcgattaaccgtcctgaagtacataacgcattccgtccaaaaacggtaatggagttaatcgacgcttttgcacaagctcgtgatgatgcaaatgttggcgttatcattttaacaggtgaaggtggacgtgcattctgttctggcggcgaccaaaaagttcgtggtcatggtggatatgtaggtgacgaccaaatcccacgtctaaacgtattagacttacaacgtctaattcgtgcaattcctaaaccagttatcgcaatggtagcaggttatgcaatcggtggaggacacgtacttcatatcgtatgtgacttaacaatcgctgcagacaacgctgtattcggacaaacaggtcctaaagtaggaagctttgacggtggatacggagctggttacttagctcgtatggtaggccacaagaaagctcgcgaaatttggtacctatgccgtcaatacagtgctggggaagcgcttgatatgggcttagtaaatacagtagtaccattagaacaacttgaagcagaaacagtacaatgggcacaagagatcttagcaaacagcccaatggcacttcgtttcctaaaagctgcattcaacgcagacacagacggtctagctggtattcaacaactagctggagatgcaacgttattgtactacacaactgacgaagcaaaagaaggtcgcgacgcattcaaagaaaaacgcagtccggacttcggtcaattccctcgtttcccttgatcaaatcaaaagcggagccgactgtttagccccgttgactaaggttcttagacggaagcggctcgcccacaaagtgagtcgcaaccaaatgatcaaaccggaaacaaaacaactaagagacttgatgtcacatcaagtctctttctttcatgaaaggagaatgtatgatggagacgatgccaaattggttaaagcaacgtgcatttttaacaccagatcgtactgcaattgaaatagaggaaaaggaagttacttttatgcagctgcatgaaaaggtagtatctgtttgtgaacacctcacgcatgtaggagtgaagcgaggggaaaaggtggctgttctgatgaaaaatggtatggagatgattacagttattcacgccctatcgtacgtaggagcagtagctgtgcttttaaatacgcgtctttcaagagaagagctactttggcaaatggatgatgctgaagttatttgtttagtgaccgatcaagaatttgatgctaaagatgttcctgtctattcattcgccgaagtgatgaatggaccaaaagaggaagcctctatacaagaagaattctctttagaagaagcgatgacgattatttatacgtcagggacgacagggaaaccgaaaggcgttattttaacatatggaaatcactgggccagcgcggttggctcttcgcttaatttaggacttcgtgatgatgattgctggttagcgtgtatgccgatgttccatgttggcgggttatctcttctaatgaaaaatattatgtacggcatgcgcattttactcgttccgaaatatgatgctgattttattcatacagcacttcaaacgagaggcgtaacgattatttcagtcgtatcaaaaatgttaactgatttattagagagacttggagaagaaacatatccttcttctttacgatgtatgttacttggcggaggaccagcgccaaaaccgttactcgaaacatgtgtagataaaggaattcctgtgtatcaaacgtacggtatgacagaaacgtcttcgcaaatttgtacgttgtccgcagattacatgttaacgaaagtaggatcagctggaaagccactatttcagtgccaacttcgtattgaaaaagacggcgtagtagtgccgccacatgcggaaggcgaaattgtagtaaaagggccgaacgtaacaggcggttattttaaccgtgaagatgcgacgcgtgagacaattcaaaacggatggcttcatactggcgacctcggttatttagatgaagaaggatttttatacgtattagatcgccgcagtgatttaattatttctggcggagagaatatatatccggctcaaattgaagaagtgttgctgtcccatccagcgatagcggaagctggtgttgtaggtatgactgatgataaatggggacaagtacccgctgcttttgttgtgaaaagcggggcggtaacagaagaagaaattcttcacttttgcgaggagaaattagcgaaatataaagtgccgaagaaagcatgtttcttagaggaattaccacgtaacgcttcgaaaaaattgttaagacgagagttaagagaattagtggaggagaaagaaacagtaaacaaaaacatagacaaaagtaggcatatataataaaaagtaattatgaaacaatataaaccaaaagaattttcagaaatgcttaatgtctctgttaagacattgcaaaggtgggacaatcaaggtgttttaactgcttaccgaaaccaaaaaggaagatgatactatacagaagaacagtataaggaatatatgggtattcaagaagaaaataaagtaggcaaagtagttatttacacaagagtatcaaatccaggtcagaaagatgatttagaaaatcaggttgagtttttaaaaacattcgcaaatgcacgagggatgattgtagatgaagttatcaaagatattggtagcggattaaactacaaaagaaaacagtggaataacctgattgacagttgtatggaaagaaatatttcgactatcatcattgcacacaaagatagatttgtacgttttggatatgagtggtttgaaaagtttcttcgtaaaatgggagtggaaattatgattgttaacaatgaaaaactatctcctcaagaagaacttgtgcaggatttaatatctatcattcatgtatttagcggtagaatatatgggttgagaaaatacaaaaagaaaatgtcggaggatgaagatttatgaaaagagcatatttaatagaaatcaaaccgacaactgaacaagttagtaaaatccgtcaaactattggggtgtgtcgatatgtatataacctgtatatctctaaaaataaagaggcatatgagtcggatgggaaatttcttagtggctatgacttttctaaatggttaaacaacattcatacaaaagagtgtgaccagtggattaaagaagtgtcgagcaaagcggtaaaacaagcgattatgaatggagataaagcttttaagcgattttttaaaggtttatctaagtttccacgatataaaaaaagaagaagcaagatgtgaagtgctactttccgaaaaacaacaaaacagattggacagtagaaagacatagagtaaaagtccctacaattggttggataaggttaaaagagtatggatatatttcaaaaaatacaactgtaaaaagtggtacagtatatcaaagagcaggaagatactatgtgtctatactctgtgaagtgaaagaggtaaaaccaaattcaattctcaatgcagtaggtataggaattgatttgggaattaaagacttcgctgtacgtagcgatggaaaaactcacaaaaatataaataaaacagtacaagtaaaaaagatagaaaaacggttaaaacgtgaacaacgctctttatcacgcaaatttgaaaatataagaaagagaggtgaacaacctgttactaataaaagagcgaatataaacaaaaatattcttagggtgcaacagctacatgctaggctagcaaatattcgattagcgtatgtaaagtctattgtaaatgatgtggtgaaaaccaagccaatgtttattacagtagaagatttgaatgtgaaaggtatgatgaagaacaaacatctatctaaagctgtagcgcaaccatgtttttatgcttttaaaacatggttatcaacgaaatgtagggaatatggaattgaactacggcaagtggacagattctatccatcttctaaaatatgttcatgttgcggtcaaaaaaagtcggatttaaagctgtctgaccgagtatatacatgtgattgtggaaatgtaatggatagagatttaaatgcatctatcaaccttttacaagcaaaaaaatatacaatactaacgtaaatagattgtatatatgtacggtgggctacatcggaatttacgcctgtggagtgtcacagcaaactgtagtagcaagtgattagcgaggcagggcacgtagaagcaggaatactctaagaatatacatttgtctatatttttagtagcagatgtaggtggaaataaaaaaagcgacacttcatataacagaaatgccactcgtaatcccgtttgctgcaagctacgggacttacgaaaagcgtgagagtatcgttattgaattagaagatgaagatgggtacattggatttggcgaagtcgttgcgttctctgaaccgtggtatacggaagaaacggtgaagacggcgctgcatgtactgcaagactttttaatacctgatttattaaaggctgaaatttctcatccgaatgaggtaccgggtctatttcaacatataaaaagaaaccgaatggcaaaggccggaattgaaggggctgtttgggatttatatgcgaagtgtcaaaagaaatcgttagcgacagtgcttggcggaacgaagtctgaaattgaagtcggcgttgtaattgggatcaatacgattccggttatgttaaaacaaatcgagaagtacgcagaagaaggatacgagcgttttaaagtgaaaataaagccagagcatgattacgaattattgaaagagattcgaaaagagtttccgcatatcccgctaatggcagatgcaaattcagcatatacattaggggatacggagaggctgaaacgactagatgaattccaattaatgatgattgaacaaccgttagccgattatgattttcttgatcacgcggagttgcaaaagaaaattgaaacgccgatttgtttagatgaaagtattcatagtttagaagatgcacgcgttgcgattacccttggtagctgccaaattgtgaacgttaaaccagggcgagtgggcggattaacagaatcggttcaaatccataattattgcatggagcacaacatacccgtttggtgcggcggtatggtggagatggggatttcaagagcacaaaatgttgcgcttgcctcattgccgaactttacgattccaggcgatatatctgcttctagcagacattgggagcaggatattatttcgccggaagtgacgcttaagggcggaaaagttatggtgccgcaaagtgttgaagctgagtatgaagtagaccgcggaaggttggcggagatcacgaaacagcgaattgttttggagcggtaacttgagtctttaaagtagcgggcgaatttcgttgttaattgtcggtaagtcgatatatttcaataatcgctgatataatgcgagttacggtcgatataattgagaaatcgccgatataattcaagttatggtcgatatatttggaaaatcgctgatataattttatttacaaaggttactctaacgggtaaccttttcgtattgtacaaattggatagactagtttacaatcgagcgtataaaagggggagtaaaatgaagcgcatttcaattttaatagtggatgatgaggcagaaattgctgatttaattgagatacatttagaaaaagaagggtaccacgtcgtgaaggcagcagacggggaagaggctgttcatattattgaaacgcagccaatcgacttagtggttttagatattatgatgccgaaaatggatgggtatgaagtgacgcgtcaaattcgcgcgaagcaccatatgccaatcattttcttaagtgcgaaaacgtctgattttgataaggtgacaggtcttgtattaggtgcagatgattatatgacgaaaccttttacaccgattgaattagttgcgcgtgtaaatgcacaattacgtaggtttcttacattaaatcagccgaaagtagcggggaataaatctgctttagaggtaggcggagttattattgatcctgagcaaagaacagtgaacgtctatggagagcaaattgagttaacgccgaaagagtttgatattttatatttattagcgagccatccgaagaaagtgtataatgtggaaaatatttttcagcaagtatgggcagatgattattatgaaggcggaaatacagttatggtacatattcgtacgttgcggaaaaagcttggggaagataaaagaaaagataagctaataaaaacagtgtggggagtagggtatactttcaatggctaatatgatgaaaagttttcgatttaaaatgattgccttatttgcgttaagtatggtgcttgcagcaactgtaacttatataatttataaaggattgcagctgtattataaaacgatggttcgctatgaagagcctttagcgcaatttaggtcagtggtaagggaagttggagacattaacttctttttaattttctttattccgttatctattatctttttcttctttttgacaaaaccgtatttaaagtattttagtgagatttctaacgggattcatcatcttgcgaacggtaactttacgaataaagttcaagtttcatcaaacgatgagtttggagatatcgcacgtgaaataaatgttgcgagtgaaaagttaaaagaagcggtggaaagaggagactttgctgaaagtagtaaagatcagctcgttgtaaacttagctcatgatttaagaactccattaacatccgtgttagggtatttagatttaattcttaaagatgagaatttaacaaaagaacaaattaaacatttctccacaattgcatatacgaaatcgcaaaggctcgaaagtttaattgatgagttatttgaaattacacgtatgaattatggcatgctaaagctagataaaaagccgattgatataagtgaactacttatacagttagatgaggaattgtatcctttattagagaaacatcatttacaagctaggttgaatattgatcctcatttgccaattaacggtgatggaaaattgttagctagagtatttgaaaacttgttaacaaatgccgttcgatacggatatgatgggcaatttgttgatctgaatgggtatatcgataatggagaagttgtcgtacaagttatgaattatggagacagcattccagaagaagatttaccgtatctttttgatatgttttatacaggtgataaatcgagaactgagaaccgtggcgggacaggccttggactgtttattgcgaaaaatattgttgagcagcataacggtacaatttctgctgaaagtaatgtagttagaacaatgtttgaagtgcgattgccaaaagacgagaacttaacaatttaataaaaatttaaactttaccccactttttattttaatagttttttctattctatacgtaagttacgttaaggaggaactagaaatgaaaaagtgggtatttatttctttttttatagcatgcacagtatgtgtaggcttttatatatcaccgttatttcaaaaggaaatcgatgttaaaattgtcggaaaagatgagctagtaaaggcggcaaataccgagaggaaagagattacgaaggaacaaatttataagggtgatttattattagttaatagggattatccagtaaaaaaagatagtattaggtctgatattataaatgtaaatcataatagtgaattagtaagaggctacgtaatatttgatagaaatcttcgtttatcaaagtatgttgtaaaaaagtttttgaacgttgtcgatgcggctggaaaagatggcgtacagcatttcttaatgagtagtgggtatcgagattttaaagaacaaagtaaattatataaagaaatgggatctgattacgcgcttccagcaggatatagtgaacataatttaggattatcactagacgttggatcaacgcaaaagaagatggagaaagcgcctgaaggaaaatggatcgaagagaacgtatggaagcatggctttgtattacgttatccgaaaaataaaagtaacattactggaattcaatatgagccatggcatatccgttatgttggcctacctcatagcgcaattatgcaaaaaaagaatttcacactagaggaatatttagagtttttaaaagaggaaaaagaggtttcaactgaagtagaaggtaagaaatatactgtttcttattataaagtttctgagaatacgaaagtgaacgttccagcaaacaagcagtatgaaatttccgggaacaatatggatggggttattgtgacggttcaggaatagagaaaaaaggctgtgccatttgggacagccttttcttatataagaaaggaattgaagtttttttgtcggtaaatcgatattccttgtcgaatcgttgatatattgtaagttatgatagatataattgaaaaatcgttgatataatttcctatactattaccattttggaggagcatctttttattcactttcaaacattataacgttatatttacttctccctttttttgtgttacgctaaacgtgtgaaagacatataaaatgaaactttaatgtaagcgtattcttatggcttcttatagaaaagggtggaagtacaatgacagaacgattcgtactacgtaatgtaaaacgtgtgaacggggaagagattgacattgtaattgaaaataataaaatcgcacaggtgacgaaagctggtgctggcgagggtggaaaggttcttgattactctggtacttacgtatcgagtggttggattgatttacatgttcatgcttttccggagtttgatccgtatggcgatgaggtggatgaaattggcgttaagcaaggggtaacgacaattgttgatgcgggtagctgcggtgctgatcgtattgcagatttagtaaaaagtagagagcaggtaaaaacgaatttatttgcctttttaaatatttctcgtatcggtttgaaacgaatcgatgaattatccaatatggaatggatagataaagagaaagtaatagaagcagtagaaaagtataaagatgtaatcgttgggttaaaggcgagaatgagtaaaagtgtcgtttgtgatagcggaattgaaccgcttcatgttgcacgctctttatctcgtgaaacatcattaccaattatggtacatatcggttcagcgcctcctcgcattgaggaagttgtacctcttttagaaaaagatgatgtcattacacattacttaaacgggaaagaaaataatttattcgatgaagaaggcaaaccgctacctgtattactagatgcagtgaatcgtggtgttcatttagatgttggtcacggtaatgctagtttttcttttaaagtagcagaggcggcgaagcatcacggtattgcttttaatacaattagtacagatatttaccggaagaatcgtatacacggtcccgtgtatagtatggctcacgttctttcgaaattcctttacttaggttatccgctagaagaagtaattgacgcggttacgaaaaatgcagcagagtggctgaaaaaaccagagcttggccgcattcaagaaggagatattgcaaacttaactttatttacagtgaaagatgagaaggttacgttaattgattcagaaggggatcagcacattgctgaaagaaggattgatacgaaaggggttgtaatcaatgggtcattcattgaatgctaagtacggattaaaaagagtaattaatgcgagcggtagaatgagtattttaggtgtatccgctcctacagatacagttatggatgcgatgaaacatggtggacaaaattatgtggaaattgctgatttagtagataaagcgggagaccatattgcgagaattctagattcagaggcagcggtcgttgtgaactcagcatcgagtggcattgcgctttctatcgctggtatcgtgacggaaggaaatcgccgtaaaagtgaaagacttcatcaagaagtaatcgcgaaaaacgaagtaattatgttaaaaggtcataacgttcaatacggtgctccagttgaaacgatgatttatttaggcggcggtaagcttgttgaagtgggttacgcaaatgaagggaaagcagagcatattgaagatgcaattggtgaaaatacagcagcgattctgtatgtgaaatcacatcatgcagtgcaaaaaaatatgatttctgttgaagaagcatgggaagtagcgcagcgaaataacgtaccacttatcgttgatgcggcagctgaagaagacattcaaaaatatgtgaagtattcagaccttgccatttatagtggttcaaaggcaattgaaggacctacttctggtattgttggcggtaaacgaaaatatatcgaatggctgaaagtgcaattacattgcatcggaagaagtatgaaagttgggaaagaaacaactttcgccttacttcaagcgcttgatgagtacggcgtaaaagaagataaaagtgagcaagaaaaagaattgctacaagtacttatgccgctaaaagaattaaaaggtgtaaatgtaacgatcgttcaagatgaagctggaagagcaatctttagagcacgtattcatattagcgaaaaagagttaaataaatcggcaaaagacgttgtgacagcattacgcgaaggggaaatcgcaatctatacacgtgattacggagtaagacaaggattctttgatattgatccacgtccacttcaaggtgatgacatacatgtaattgaagaaaaattgagagaaattgtagggggaaactaaaatgacaaatattcaaaaacgtttttataaaggccgcgtagcattaaatgtattagcgaacaatacccgaaatgcgaaagatatttttgaagcagcagaagggtatgtagtagtgggggtattatcaaaagactacccaacagtagaagaagccgttacagcaatgaaagcatacggaaaagaaattgatgacgctgtatcaatcggactaggagcaggagataatcgccaagcggcagttgtagctgaaattgcgaagcattatcctggcagccatattaaccaagtgttcccttcagttggagcgacacgtgcaaatcttggcgaaaaagatagctggattaatagtttagtatccccaacaggaaaagtgggttacgtaaatatttctactggtccaattagcgcagctggagaagaaaaagcaatcgttccaattaaaacagcaattgcacttgtacgtgatatgggcggaaattcattgaaatacttcccaatgaaaggtttagctcatgaggaagaatatcgcgcagttgcgaaggcttgtgcagaagaaggatttgcattagagccaacaggcggaattgataaagaaaacttcgaaacaattgtacgtattgcgcttgaagcaaacgtagagcaagttatcccgcacgtgtactcttctattattgataaagaaactggtaacacgaaagtagaagatgttcgtgaattattagcagtcgtgaagaagctagttgatcaatatgcgtaagaaaattgcagcgtttggcgaagtaatgatgcgcatgcaagtacctggatatgaattgttgtcgcaagctaacacgttaaattactcattttcaggtacaggtgtgaacgttgcagcggcactttctcacttagggcatgaagggcttcttatttcaactttaccggaaaattcggttggagaggcagctgtatcttacattcaaaagttagggattcaaacttctcttgtttcaagaggcggtaaatatgtaggtatgtattttttagaaaatggattcggtgcacgtgcaagccgcgttacgtattcgaatcgactagaaagtagcttcaatacggcgtctgaagagatgtaccaatttgaagaaattgctaaggaaattgatatcgttcatttttgcggtattacacttgcgatgaatgatacggtgcgccatcatatgaagtctttagcgagagcagttaaagaaaacggaggaaccgtcgtttttgattgtaattatcgtccatcactttggggagaagacggatatgaacaggcaaaaccgcattatgaagaaatgctgggacttgctgatatcgttatgatgaacgaaaaagatgcaatgttcgttcttggaatgaaaacagaagagacagagcgagaggcgcaacttgttgatcttattccaaaggttgctgaaacatatcatatcgctacaatcgctggtacacatcgctctattaatagtgataatacacactcgctacgcgggtttatatgtaaagatggtgcgttcacttttgcaaaaacacttgcgttttctgtatatgatagaataggtgctggagatgcttatacgagcgggattattcatggcgagatagaagagtttgcaccagagaaagctgtttcatttgcgtcagcagctggaatgcttgcacatacaatcgtcggtgatacgcccatgtcatcagagaaggatatacttcgggcaatgacggcatcagtaggtgatgtagaaaggtagtgggtgtaacggtgaacgtaacgaggaaaaaaggaccattatatttacaaataaaaaatattattcgtgatcgaatattgcatggtgtatatgcgattcatacgaatattccttctgaaccgcagttagaagaagagttcaaagtgagcaaaattacagtgcgtaatgcaattaaagaactcgctcaagaaggatatttagaaaagaaaagcggtaaaggaacgaaagttatccgtaatacttctgcgacaaagttgtcaaaaggtaagaaatttacagaagtgttagtggaagaaggatataaagtacaaaagaaattgctaaaagcagaaatcgttcataatgaagaaggaacggtgccatttcgattattcggcaaggagagttttcgtattgaacgtttatatacgttaaatgatgcaccttacattcattatacgcactatttctcagcaggaatggcaagtacagatttatcggactttgacttgcaatcgctttatgatttagttgaagaccgaggcattcacttagaaaacttcagagatgaattcgctgttggactcgcgcctagtttcgttgcagaagcgctaggtgaaaaagaggggacagcgttattaaaacgtatgcgctattcttatgatgaagttggcgaagtaattgaatatagcgaaggctactacaatacagaaatgcagtattatgtagtgaattatgacgtataaaaaagaggggatgttggtcatctccctgtcaagtagacagaaataaaaagagtattatgccacggccttttcccgatattctatcggggaaaggccgtgaagtttttcttggaatcttaagattccaagaaaaacttcacggcctttccccgatagaatatcgggaaaaggccgtggcataatactctttttattactgtctacttgacagggagatgaccaacttccctctctttttttatttgcctcaagtttctaactttaaaatatattctaattaataattgtaaagaagtacaatcggcactacagcaataagaaaagcaattacactaatttgcatattttgttttctattcactctgttttttaaaaatagatatgcaaatgaattaataagtaaaattgctacatagatccctgcataaccaagtggagaagtaactatatcccataaaaatatcaatccagtaccaataaatatgctcaaaaaataaatagaaaataatagaattttttccaaaaaatatcttcctttcattatttatttcttgtataatcctattatagtaaaaattttctaaaaataggaggttattatgagaaaaaataaaatttgtttatctgtttgtgccactgcattaacattggtttcaacactctcaatttttagcgaaaacaaggtagcagctgatactattgaaaacacgacaattcaacaaacgcaagaatcaaatgatcttaatcaaattaaaataccaatcaacgatatcaacgatttagacctagaagcactaggatttactccttcacaaatcaatgactttaaaaattcaacttctcctaatagtctagcacccttagccgctgcaaaaactcaatatgtatattggaataaagcaaaattacaaggtgtcttatgtcgttctttatcatcattaccaaccggaaaaccccttggtgattggatactttctcaaggaatagcactacttggaccagcactatcaaagtcagtaggattatcacttgcatttattaatacagctttaaaaaagagagttagttttttacaaaacgctttaacacaagtccgatttggacaagctactggtattcgaattgcaattgaacctaatcctggtggataccctgctgcttacgtaacaatgagcatttattaatagtaataaaaaagaatgcagatatttaatctgcattctttttttaatgtgaaaataaatattattgctctttggaaacatacactctttcttctctcttgcttcatcatgtttcttctatttaatctttgaatatccacattagaattctcaccgctatatcaataagtcacatcatccgatcaaattcacaatttctcttttcttccaaacgaattttctctttttgttctttcacttttatttcgatgtagtttttttacgcttttctttcttcataaatctcagaccctctttctatatatttgaattgtctactattgatatatcgaattccacattacgagtaatatcaggtgccaaaaaaattatcagacacagtgtcgtttatttcactcatgtgtattatcatctttagataatttattaaatatataattatataaaaaaatagaatttttaacactataaacttaaacaaaaagtcaactacaactatcctgaaaggtacaccttttgaagtacattaaactctattaaatttaatacttcaaaaggttaaaaaccgtatttttgaagtattaaaaaattaaagataccttttgaagtatttttgttataattttagtagaaccaattttgaagggatgtctatttattttgaatacaagaaaatttggatatataagagtcagtagcaaagaccaaaatgaggatcgtcaacttgaagcgatgaaacgactcatcactgatgaacgagatatttttatcgataagcagagcggaagagactttaaccgtgaacaataccaacttctaaaacgcatgttaagaaaagatgatattttatatatccattccctggatcggttcggaagaaataaagaagctatccttgaggaatggaaagatattacccaaaatatacaggctcatattatcgtattagatatgccacttttagatacaactcaatataaagatagtttagggactcttattactgatttggtacttcaaatcttatcgtggcttgctgaagaggaacgaacaaaaataaaaactcgccaacgtgagggtattgacgctgcaaagaaaaaaggaaaacatttaggaagacccagaactgaaataactccagaatttattaatgcctataatatgtggaaacacggacagataacagcgctatatgctatggaaatgtgtaatatgagtagccctacattttatagagtggttaaaagatttgaagataggaggaataaaaatcaataacattacaagaaaaaaccaagatacaatacaaggattttcatcttatttattaaataaagggcgaaaaccctctacgattaagcgatatatctatgatgtagaaagctgtattcaatggctgcatcaatcaggaagattctcggactctgaagaaatgaattgggaatccctatataagaaggatttcgaagcattttttaattatttaatagaagaacgccaatactccgataaaacggtacatcgtatttacatcgttcttaataggctgtacgaatatttagatttacctagccccattgaaggtgttgttcacatagctccacctgatcgtgcattgcgtactgaagactttatcagcattcaagaagaggaacgcctaaaacaagtatccgcatcattagaggggctgacagaaaaacaacgaactagccgtcctatgattttagaacgaaatctttctattataatcttgctcctagactacggattatctctacatgagcttgtcgctttacgaatgaaacatgtacattttgagaacaatacactatctattcctgaagacacaaagattaatcgtacaatccagttaaaagaagtagataaattacacttatatcattactataaaactattcccgaaccagtacgcccaagatatcacagtgatgatccactctttgttgcttttcactttaggttggggacttatctttggagttatgacaatgacgcaccaaaatttctaacggacatgtcagttcaaaaaatgattcgtttagagataaaacgagcaaatttaaggaaagggatttctgcacaacattttcgaaatacctttattttaaagatgattcaacagcaatacacagctgaagatattgttaagcaagtcggctttaaaactgacgtatccttaaaaaggtactatacatactatgagaaaactaacgagaacaagggttaaaacactgcacttgctatataaattttatatagctacagatttttcaggtgagatggaggtgttaagatgaagaaaaataaggagtcatattttatacacaaatacaccttgcgagaccagactactaaatctattaaaatcgagtcgtggcgttcattaagggaagaaatgcaagtattaggcataacggatagcgacatttttcaaatgcaaatgattaaaataaagccaaattaaaagcgccataacgttatgttattgcgcttttaacttattcatatcactccaattttcaaattagacgtggaagaagaaccaatcattgttggttataacgtgagagtaattcgatattgtggacatgtatatatgttaacatgtgtacatttttaataaaggcttgtagccaaaaatacaaatgaattaaataatatatgcgctactattggtacttttatatctctggtcttttcgtaactccatgcatataaacaaccatttacaaagtaagggaagaagaaccaatcaaaatgcacggctgcaaagataccattagcgatgagaatcgctgttgtacgattgattcgttcaaacagtttttctattccaaacggtagaatctttctgaaaatccattcttcaattacaggagcaattaatagagggacaattaaatagaagatattcaattctacttttgcattcacctgttctgcattgcctgtgtcgattccaaaatagctttttatataggaaaaaaagagagtggacacgatagctagtccagtcgtcattaacacccattttcccttttctactaatctttttacattcaactttcttctccccttactatgattctcgtttattttttagcaaattcaaatgtgatctttccgctagaatcaagcttcaaatacgcatcaaattcttttcctgatttccctttcattcctttaattaatcctgttttcttacccgttaataattttttaacgtttgcttcgctaattttctttgttaaaaattcgctcggaagagagaacttacaaccttccttataacctgtacaaccgtaaaatgttttgcgattcgctatgcctttgccacatttcgggcatttccctacggaatcctttgttttcatttcttgtactttgctatctatctgaagctcaccaattgacttcgtagcgttgacgatcaattgcttggtaaattcccctgtcttcgctacaaacacctctttagagccttgtttcttcccgattttacgcaaatacccttcccattgcgctgtcatttcgggcttcgctaataacgtgccgcccacggcttcgcaaagaatttcacctttcggtgtaaccgtcactttattctttttcacttctatatattcttgctttttgagcgtttcaatgatgccagctcgtgttgcttccgtaccaagtccttctacttcttttaggatgcttttactttcttcatcttctactgaagcgccgcatgttttcattaaagtaataagttgtccctctgtataaggatttggtggtgttgtgatgccttcttttgtctgtatcttcccttgtacaagttcgcctttttgtacaactggaaggagggattccctgtcttcgctctcttcttcgcttggttgatctgttttataaagttctttccatcctaacgctttttccgattttccttttgtcgtaaactctaacccattcatatctgttgtaataattgtttcttcatattcgtaaggcgcatggaacatgcctaacacactctttaacacttccgtatacaagttgcgctgcttgtccgttaattgatctaccttttgtttcgaaggaacatttttagtcgctataacggcatagtgctcctgtactttttgattatcgacgtagcgtttattcggatctaatgattttggttggaaggatactcctataatagattgatatccctctaggtttcggactaaataagcaaattcattttctgtaatgaaattacagtctgttcgtggataggtcacaagttttgcttcgtatagctcttggacaattttcaacgtatcggcaggtgaatacttgtactttttattcgctaaagcctgtaaggaagaaagagagaacaactttggcgcttcttgtttcttcggttttacttcaacggattttactgcaccttgctgattcgctccttcagacagctgatgtttcttcagtagcaattccacttcatttttcgtttggaatcgctctttgtatcttcccttgtatgttccgttcatccctttaaactgtccttctagttcaaagaaaggggatggcttaaagtgtttgatgtcctgctgccgttggttaatgagacataaaacaggggtttgcacacgcccaacgctgtaaacaccttgtacgcctttttgacgtaataacagcgtatataatcggctcgcattcataccaattgcccaatcactaatttgacgagcctgtgcttcagcaaacatactctcaaactccgagccttccttcaagttctgaaatccttttttaatttcatccacttctaagctgttgatccaaaggcgtttcatttttttagaagaacagcccgcttcttgaatgattaaacgtgcgattgcttcaccctctctatcaatatccgttgcaattgtaatacaatctgcttccttcattaatttttttacaacgttgaactgctttcttttatcggctgatactttatatccgtagcgctccggtaaaattggcaattgtgacatatcccatttttcccactctgctttataatcttgtggtgctttcaattccactaaatgcccatatccccatgtaatattcgctccattcggcattaaggaacaaggcgcaatagaaaagtagccatccttcttctcaactttcgggaatgcttctgtatacgctttcgcttgtgatggtttctccgcaataattaatgtagtcatgtgtattacttcctctcattattaaaattttgtataaaaaaaggagtagcatgaattatgctactcctaaaaatgtgaacatgtgtaaatgtgtatttgtgtacatttatcataattgggttaataaatatatttttctatagcttcttctattgtttcagcagctttttcttctgagtaatctaaataggctggcattacttcaccgatatttaataccattaaatcaaaccttttcccaatgctttcgttataaaaacaatgagaataataaataggaatttcatacaacatccagccctttatattaaaacctgtctcgtggatataagtaatacagttgtgaaaacgaatcattgagtcatcttcaaaattctgtttattgcaataaactccactttcaagcccttcaaaacgaaaaatatattcttctatttttatctttatataaacattcaaactattttccagtaattcttttgcaatttctaacttctccattcaaatctcctccttttaaattttgtatacaaaaaagagagcaacatatcgctacgttgctcttactgtttttattgattcttcgctttatattactactcactcttcatttaccttcaatcaaaatatcaattgctctccaataactttttacaacggctaccgcttcatcttctgaagaacaaactacaattgcagctaagtatttttttccattgtatacacatatttcagcttcagaatatctactaatttcgtcatcttctaattctcgatgaattaaaaaacgattatcatactctttttcaattaaatagctagttgaatttaaaaaattattttctacccgatttggatagttcatttcctttatttctcttgcaaaaaagtagctctctgtatttacgattaatcttttctcatgttttgagtaccaggaaaaaactttaatcagatcttccatatccgtaatatgcaaagggtagtgtccactacaatatttattcccatcagaatcctcactccttaagaacaagcaccaaactggttgttcctcgctagcccttacaatatatccatagccttctttatcagagtcatacaaattatcctcaataataaattcctctagtgtaccgtgttccaaattcagagcattcttttctaatggttttggatttaatacaaactcatttttaaataagtagtccctgtctttgtataaataaccttctgtatctacaattatttttctatcttgcttagaaaacaaagaaaatacttttatcaaatcttctagatttatattattcaaaggacagtgctcaccataatatttctcccctttagcaccatcacgttttaaaaggaaacaccaaaccggaacttcctcactatatcttgcaatatatccatacgtctctgatttagatactcccaaagccatagaaaaatattcttcgattgtttctacttcgttattttgattatcattttcttcaatttcatgaacccaatacgcacagttttgtaaggaattatcagtagcaaagaagtgaccatatttctcaataatctcttcaaattcttctttactaataaaatgaccttctgtaaatcctacacctacatcttttgtataaccaacaacttcataattgtcccccagaatatcatgtgagtaaaaatcaaacttctttgtttcagagtcataagctatccttaatagtcctgacaaagttgaatccgcttcttcaaaatatgtatataagccatctgaaggctttccttcaaaaactttaccaaaacgaattaacattgaaacaccagaaataatctctcctgttttttctagaacaaattcttttttcgttgttaaaactttatcgtattctaattgatatttcattttcttcttcctctcactaataaaattttgtatataaaaaggacaacataacgctatgttgtcctttttatctctcacgccccatttgacgcatatatgctattcttctagctttatctctttctttagcttgatctctttctttatattcttggcacttttcttctaatttagggaaatcacaacaaactccttttaagaatttttgtttatgtgaaggctttccttgtacagttacatctttatatactttttccactttattagtaactcgatccatattttcttttaaaaataaatactgttttaacatcaaattaccatactgagggtctgctgctgttttttctgctatatcaatttctttacactctttttctgggactggaatcatgttattaaccaataaaactccaattcgcttttcatcagtatcgaataatttcacactgacctgactgttaaaatttttatcgttacgtgatgttaaaggtacaaaataatcatgaccattgattttttccaatacacctacatacggtctactatgctgttcatctttattaaaaggtactttactatccgtttctcttaaataatctatatattcagttgaaatggtgtagaatttaggattatctttattagccaactttcttctccccctagaaacaaaaaaagtaggaagaaaactctccctacttttaaaattcttttttagcgcctactacggtaaggctacaccaattttttggtactcactacggtagagttacaccaattttttcgcacctactaaagtaaggttactctaattttgtacctttattatatgcggtttactaataaaaatcaacattttcaacttcatttcacacattttaaaattacatttcgattatttatctctctctgcccatttgttgtaaataagctgtacgtcttccttgttctcgttgattggctactcgcttgcattcatcgttccaatcccatttttgttctttagacggtgcttgcggatattccggcttaaatgcaactatgcttccatcattcttttcatagcgaaaatgtatcaatcgttccgcaaaagctttacctgctttgtcattgtcaacgcataatgaaagactgtcaggaacatcaccaatccgctcttgactcttcatatagtaattaaatactacttgtggtttcagcccttccatactaactaaatgcgtatctttaaggtcatgtttatgtagtgatacgtagcttagtaaatcaatagaggactcaaagaactttagatttcggggttcgccctgcaatacattaaaaccgtagttagccgtagaatttttttggatacttttccacgccccacgtttgtatttatccgattttacgactccttgctctgatccacccattaccgctcccgtttcacggtctttccataggaacaatacattgttgtacttatcttgtttaatcagtccttttttatgcaatgcatctacaacttgcggatcaatctttctttcctcagtcagatattcccttgctctatcgaattgaggtacttctttttccgcaaaatgttcacaatcataaggctcactcacaaatgtaacctctgaagctttttcatagtcctgttctccgtccagtaatcgctgcatcgccccagggaacgaagcatcttctacctcctgtacaaacttgataatattcccgttaacccctctactgttccagtagaactgatttttcttcctatcaatgattaagctatcgtgttccgctaaacggtaataacgttcactgtcagactttacagggatatcgttttgcatacaataatccacaatatcaagtgatgctgccttttcaatttcttcctcggtatatcttttggtattcttcttttgttgttccatagcaattcctccaataaataaagaccatgcattttcacatggtcattttcgatttatttatatttgtatttgttctgctttaactaaataacgctttaaaggattctaaaatgcctgaagccccaaattggaaacttgccattccatatgaatacaactcatacacaactacaatcgtactaatcattaaaatcattttttccgctataccgttatagctgtagtaaaaaatatggaatccactttggaaatttctattggataatggcagcagccacttaataccttttttagagaaactgtcttccactagatgtagaaagtatcctgcaaggatgcacatgccattcgtaaaggtcaatggtgtcatcccgactgcaaataaaataggaatcaacacaagcactaaaccaaatagtgaatgagtgattcctctatgaccaaataccatattcattaagtccgatactccacgagttctcctgccaatccatgaatgttgttcatctatatcaggcaacaaagccccaaaactaaccgctatcacatttccaatcgtgaggtttcccgttgatgccaagacaggcagggcgaccgctaggcttgttgtaagatgcgttttatacttcattggttatcccactttcttatattaataatcccgaccaagcatgtgtttcatcatataatgttttcttgcttgctctcttgtttgcgatatttgctgttgttcttcctcatggacggtatctttcccaacatatcgctttccaacttcagggatggtttttgattcttgtacctctatagcgccatgctctttcttcaccgacccgactgttttagcggattccatttgaaaaacttcctctgtttcgctttttcgatcatttacgatctcttctactggattgaaacaaagttctccatcttcaatcttcttttcttccatatatctaagaggagcaagtcgtttttcttcaacatcttcgtagccgattgttgtataataagcatcttttccctctatctcttcaggaatcacctcttctgctactacatatccatagccctcaaagtgataagccgcttcatcctgctgcaatggtttccctgtcgattcacagtaaataaccatatcttcatttactggataaagcccttgatactccacatcaccattcataatttctttgtgtgatttagtaattgaatgattgatatgtttaacagcttcaaatacagaatggttaaaatcaaattcaatgtcactgtctgatacatattcagataggcactccactttcatattttgttgtctatctgttgaaactttagcaattggcgtatcatagaattctccttgaataagttcagcttcataatacggttcaaggtaatctgcaatttgattgaagttttccatttctttttccgttccacatctatttacaacagatagcatttctcctaaactcaaacgcatatcaggatgaatttcttcgattactcgattgtcttcggacagttgaatttcgtaattttcccaatgcttttctaaatcaatacctactttctcgtcaatctctagagctgctttttgttgaatgcctgttactactttatggttatccatcatttttctctctccttattagttgaaatttaaaataaaaaagaacacctattaaggtgtccttttatctctccatctgttgcatgtatgccatacgtgctatttttctagcttcttgctttttcataacggctgcttcttcatcttgttgtcctgtactcaattcttgattacttccttgacgttcaatttcttcgctcattacttctttgtgcgcttttgtaatagaagaattaatactatcaatcgcttcagctacagagtggttaaaatcaaattcaatgtcactgtctgatacatattcagaaatacattcaaccttcatgtttttatcttgatctaccgatactttagcaacatgtgtattaaataactctgtttcttttgagtcagcttcataatgtggtttcatttcttctgttacgattttcaaattctctacttctttttcagttccaaatttattgacgattgtatttaattcacccaaactcaaaatcatattcggctgaatatcctctatatattttccatcttcagaaagattaattttataatcattccatcgattttttgaatttagctctgcccgttgagagacagcattccaatgactccctaaatttaacccaatgttttcagcaacattttgttccgctttttcttgtatacgtttaaggactctttgttgaaaagcaggaaattcgaatttcttttgctccttttcatcatttactgcatctttttcgtttaattcttttgtatcgttactgattactggattgtgtttctgtagttctttttctgtccccctttgtaattcagagatttcctgatctattacattaataaacgttcttgctgtatcgtgaatgtttattatagaagaatctttttcttttaaatcttgatcactttcaacccatttactaatataaggtactgtattttcactcgtatccatcccgtaatgtgtacaaacaatatgtgtagccattcgtgtttcaaaatctcccgccacttcatctttactcccttttcctttttcaccttgcaatttttcacgaatcaattcatagatgacttcaggtatttgctttatttctaaggtgttttcattttcatcaagtgctttactttcaattttttctttctcagctacaacatggattccagaaatcaacatgtttttattttcttctgatacctcaaaatcaaattgacgattcgggaatatctttttcaagtcgtcactagtagcattggtttgtgaaatatctaatgccgatttctttaaatagtaagttatgtctttctttatttttaaatcgcctttcttaacctgtcccttctgatctactgtcaaatcttttacaagaacttctttttttgttttgggatctcttacatattctttgataagaggatgaaaaaccttcatttcctgttctccatttttcaaagaaaagccagccttgttgtaagttttcaaatttgcacatgcatacgcatcagggaattgcgatttaatcacttgcatatttctacccgaataattactaaatctagacataaactcagctaattccaaaaccccttcctttgaatgataataatgttctaagtcttcaagcaccatccccataaattgccttgtttcttccgtacttattcccatatcatcataaaacatcatcgttttctcttctccttattagttaaaattaaaaagaacacctattaagatgtcctcttacctctccatttgttgcatatatgccatacgtgcaatccttcttgtttcttgctgttttatagcggctgcatctacatctttttctgttttattagataaaaaatggtcaaccttattctgttgttcttcagaattagattgaccttttatatctccattatcttgttccctattcttttcgttctctctttgcaattcagaaattttcttatcaattgtatttataaagctacttgcggtttcgtgaacacgcataatagatttgtctttctcttctatatcctgtccgtttttcgtccattgggctatataaggaatggcaaattcactcgtatccatgccgtaatgcttacacactatataagaagttaattctgcttcaaactcttttgtaggtgtgtgttctgaatgatccaccttcacattatgtaacttcgcatgtgctaattcatgtatagatacagctaattcttttgtttcggtgtttcgagtattcataactatttcggaatgagaaccgtcaacagcttgtaaatgcataccatgagcattacctaattcattaattaatgcgccttgattgcccatcattttaatttcaatcttttctttttctgctaatgcctctatacctgtctttaataactctttgttttcctctgtcacctcaaaattaaactgacgattcgggaatattttaggcaagtcttcaggtcttgcatttgtttgtgaaacatcaaaggctgttgctttcaaataataatttgtttgcttctccacttttaactcaccagttttcacttgttgcttttgttccgcagttaatttagttagtggaattgctaattttgttttttgatctcttacaaattcttttacataaggatgaaaaaccttcattgctttttcacccttatttacatggaatcctgcatctttaaatgttttaaagctcgcacaagcatacgcatgtggaaattgtgatttaattaactgcatgtttctaggagaatagttactaaacttcgccatgaatccagccaactcaatcatgtcttcagtggattcatagtacttcgtaatatcggtaaaaaccttgtccatgatttcttgtgtttcttctttaatttgctcttttgtcttaggtgtatatttcttttttgtgtaggtcattcgcaaattaaccctctttcttcatcatatttaacaaatggtaaactatcatgttccgctgctccttgcataaactcgacataggctgccgcttcttcttcagaaacttttacgataacttgcttattaaataaatatttacttagatgaacctcattctttacttggtcaacatgatcaatcatataaaaattattttgaaacatattacacactacctttctattattacaacgctaatttgaagtatattttttcgtaagtttgttttcctttgtcccaacttatattccaattctctaacgaacccgagtatacttctttaaattttagcattggattatccattgaacccactatcactattccaaatcctttatcatatgtagaatcaccctcaaattttttccacaactcaaattctgtaattttatatttttcagcaaaaccaataaccgtttccagtatccagttttcattttcttcttcagttatctgcttctcaaaatccacctcaaaacactcaccataatcatcgttccgaattagaaaatgattttctcctttctttatattctcttctataatggttctattttcttcattacggctaaatcttgtacttgaaacgatggaataatacacttttttctccactttaaatcctccttttaaattaataatccatttcttgttgtcgtgcaattcgttcctgtacacgctcatactcttgttctgcacgccattttgttaaatcatcattcaacgccgcttcaatatttcggacatccttttttcgaattaatggcggtttgtattgagaatatgtagtgtactctcttcttttttctaaccgccccctttcatatttctttttaatctgttcattcttttgctgaaactgatacaacggattgtcctcatatggttgctttttcttcagttcttttagtaaggaattacccatacgcttctgcatatctttcatttgattctttgcgtaatctttttcttcccgttccgattctccatataaacccttctgaaaactagattctttttctacagcttcctgatattccttaaaaataggattttctttcattaacaatcctgtcagttcatcaatcttatttcttgtttcattcggcattcttttgctgccatatgtccaatcttttttgttactaggtaacccgttgtatatctcttgtaacaaagtaacttccctacttggttgcttttcttttgattgtagatactcctttttgacttcttgcactaagttatttcttagattagatattcgactcaactcacttgtacgatctacgagagagttcgcaaaagttgttttcatatgatctagtgtactttgttttctttttccttttggttcgtaaaaagtttctccatccactttaacttcgactagcttccttctattttctttttctactgttccgtagtgaatgtgaatgtgttctgtattccgatgaatagatgcaaaccaaaagccgttattctcttcaatttgttcatccttgaataactgttccatcattttatgacttgcatttcgaatccgattttcatctaacacgtccgttacaggatcatatagtttctgttctattagaaagtccgtatcgaatgagataacatcttgataataaaccgaacctttattttgtgcttttcccaccaactcttttatttcatttaaatcattggaggtaattacatttttatttttcgagaaaacacccgacaaaatttcttctgcttttatcttctcctgcatttgttcaggagacaaatcttctatatgtttattaagtaataacacctcttcttcttccgttttagtcattttctttttgctttctagcgcatattttcttcccatatagctaacatacttttcaaaatcagtcgtagtattaaaactgtttggagaagttaaaagcacttttgcttctgcttctttttcagatacactcactttcttttgattagaatgaggacttcccctctccatatcaaaagagtcaattgcattttgcaatcgactcagttcggttagttctgtatttgttaaggtatgtctctcttttaaaagtgctttttgtctcatgcaataatctacatacgttgtaaaactcttttggtttggaatggtatattgagatgttaatatgatacttggtgattttcccatacatcattctccttcaagttatgttaattcttttcgtctatgttcggggatttgttcccactcaatttcctcatacatggtctgtcctaatctagaaattgccttatgtggtttaccttttttcatgacaatttgtacatcatccgtaatcatcggtaatgttttctttgcaaaagatggtgttttaacttctctctgtatgtgttcctgctcttgcatgtttacttctataggttcacgtttaacagttcgagagaacttcccttccgatttctttgtaacagcagaagcaatttcacttttaacttcctgctccaattcttctaaacttaaatcgcttcctgatcgtgcaataagttccatgtttaacttaattaatatatccatttgttgtttcattgtattaacggcttgcgttaaacctttcacttcttttttcaaaagtgatacatcatcctcgcctttttccttcctcatatcttcatctaacaacccaattgcacgtctaaacacatccgctttagttttatactcaggatgctgttgcaagtattcctccacaatatcattatgaattctagtaatcttaaactttgctgtatcagacaaaaccacttcactcatattctctctcctgtctttaattacgagtagctaatttcattattaattcattagttgcatctatatactcttgtaacttattctcttgtctttctaatgacacggtaacattgccgactgcttcatcaaatttatcttgcttaaactgaagcaaagaatgttctacatcgttttgaatgagacttctcaagtattctgcacgagtatactttctcttcaatttcacacttattaattcacacctcttatcaatatcttttatatatttaggatcaatacctcttaacaagatgtccatgttattacttcctttctgataaatgcataactagaatagtcgtatttcctcctttctagttaagaactaaagacagtgattaaaaaagagcataaggaaacctgatatcactttgtaaacaaagcgcttaaataggctgtgcctattaggtttctacttcactcaaattgatatcactaatcctctccgagtggtcgctcagtggtcatattttaaggatagtggtcatttcgtggcactcagtggtcacttagtggtcactcaaaaacactattttttatatcgtttttttcttttcactcagcaatttaattttcttttctttcattttgatgtcttcttttaatacatcaatttctttttgatggttgttaatggtagactcatttgaatttattgtgtttttggttttcactttttcgccctctgtttggtactccatttcttttgttaacttttcatttttgatttttaattgcttcatagctgaagctttatcatcaattttcttctctatttctttcatttcttttctcaatccctgttgcgaaaatgcaagatactctttttcatagaaatctttcgattcctttttcaattctttattaatcaatttttcattttctaaaacgtacgttttcaagctccgttcctttagatcatccacgtccgtttgcaattcaggatgaatatattcaggcttcacaaccgaagatacaacaccaaattcttcaggaacattttcactaattaccacaatgtagttatcacttgcccgataaaccttcgttttcacgttattatctttttgtttaatgtatttattctctactttgtatttcatattacttagaatttgagagtcattatctgcccttaactcataatcaattcgtaacgtttgattgactggattgtattctttttttgcaactgaaatctttaccgtggtggacaaactctgatactcacctattttcatttcttcaaatttatatgtcgctccactaaaaacaggagaaatacaaagtacaaaaaacactgtgaaaaaacttcctaaagtatataaatacgccttcctttttgtatttgcaggctttctaccttccttattcattccaaaattaaaattcattttgttgtttctcctttcacatttactacgctcacgtgagcgtgaatgttttcaagtttataatttgtatacttttctttcccattaacactagactgatattcacgtacaatgagccattccactttttccccaaagttataatcaaaccatgttatcgggatttcaataaacttatcttttcgaatccccttcttttttcgtagacttaaaattaaatacctaccttcttttacataatcatgattgggttttagttcactcaaaagcatgatgttactccttcctgttagatttatttgttaaacgaaaagccccatactagttagtaaggggcttttcgtttacatcattttctattcatcgtttcgctggatacggattatactctacaactttaatttcttccccttgcttttctagcgttatctttacaacactgttaatcgttgtttttttattttctaatccctcaattgtgtactccacatcaagtaaagccgtacatttcttagaaatatcaccttctgaattaatgtatattgcagccttatttacatgtgatttgaagtttggatcgcctaaatcatctgtattaggtgctactacatctactacctttttgtccgttatttttaacaagttgtttcgtctttcgcctttattttgtaccgaataatctaaataagcatgtacgaattgatttgcaacttctctgtatttgttttgtaaatctactgttggattactttcttttttattttcgtccgctgcaccctcatttatttttttactttcctgctccaacttcacttttaaatctccgatttgcttctctttttccgctacagtcacatgatgttttttatccttcttttcaaattctttctttgtgctataactcagtattccgttaaaagccagtgataaaatcaacactacacctaaaatctttgatatattattcatttattttgcacccatttctttttttattttggaactactcttctaattcctgcatagtacttttgccatcctggtgatgtaaattggtgataccctatccctgaactttcagaatcatacattgtattagcatcaacatatatccctacatgacttacatgatcgggcccaccgtatgtccctttaaagaaaactaaatcgcctggttgtgcatctttcggatcaacttctacagttgcatagtattgttctgatgctgaaccatttaaattgactcctgctgctctaaatgcccaagaggttaatccactacaatcaaatccctgtgcaggagttttcccgccccaaacatacgggtttccgttatatttcaaagcttcctccattattttcttaaaggtttctgatccgtttactggtgcagtcccgttattaaaacttaaatattgtttcaccatttctgcataataaaagttaccgccattgatatagcgataaccaccgttgtaagcaattgctacaggttgactgtatccaattgttgttccattcctattaccaccagcaggtgcaacaactgttaaagaataataatcagccgtttgtaaagaatgcgttttactatttgtcgctaaccaatgcacataattacgaccaaagttgtatgtttgtacaatggctaacaaatcattaatccctagcattttcgcatcatcaaatgcgccttttaaatgcataacaccgtagtaaatagaatctttcgggttagaaattgtattcattgcccaaccttgtgactgttagtgataggtaaggatttgaagttatctctaccttttcccccactccacaccgtacgtgagactttcacctcaatttggcacgcccttttttagaaaaacaccccctatttatataaaaaactccccttgacttctcatagttggtctttcataataatttacatttcgacaagaaggcgcttacatcctttttatttactcttagatttctcacgtttacatatatgttgagaaaagaaactactattattcactcacaaaattatcgctaataggaaagataaagataaaaatgcacaaagtggaatatataaaccggtatccattcttgcaaagtgcgtatctttttgtcgtttaaagataccaaaatagttaaactcaccaatcactctaatagaaaagacaatcatacaaatccaggaaccgacttgaataataacattaggaactgcaaaatgaacaatatttgcttgttgcaacaaaattattgctgccatacttaataataatgcaatgaacaatgtcattcgggcgcgaggtgtaaacgccttttcccctgatttagttggaataacactatttgtcccccaattacctccgaaagcccaatatacatgtaaaaagctaactaagaataatatgcaagcagatatatatgtaatgataagcattttatcctccccttattttagttcctatctataaaatatgctattcccctccgcaatagcaaccttcattttattacataaaaaaaccgtaatgatttatcaatattaagataagtcattacggggttattaaacttcattatgcattatacctatttcttcggcgttccatccttgtttgaccttgaactgcattttctttgtatggatctattttctctgtcatttcatacgttgcaactggttcttcgtacttatattcatggattttttctggcattttacttttagattctttcccaccaaacttaaatagtttcatctttaatttcggtaatcttggaagacgaatcttaaatgataatcttttgcgtttcttttttggtccaagtagatttatattttctttattattatctttctctttgcggtgaatgaacatcgcaagtaatcctcctattacaagtcctccaattaatagtaatatatatacataatggcttgtcattaaactcgttatgcgttcaagtatgactaacgactgtacttcttttatatcccatagtaaagcggcccataatgagaataagcccaaagtaagtccatatgtacgaaaacggaataaacatggaattaacgcgacacatgcagcaattttcgcatttgctatgattgagcttgttgaaatatcttgatgccaaataactaacagtaatgttataaatggcgcatacgctatccaactgcatatacgtgaatacatctttttagcaaaataactaccgaaactagtaaaaaataaaagccctccaatatatatagattgttctagagggatttgctttgtaagtcctgcaattggaaagaggccgctcagtagcattaagagcacatctaatttcttcacaattccccattcctttcaaattttttcaattaataaaaatcgtttttccatatgaaatagtttttgtatttctaaaaaacatattaatcctgtctgcacataaagtaaatatgtaaacgaaaagatacttgacaaaggatatccttatttacatgaaaaaatgacaaatcctgatcgatataacgagcaggatttgtttactagtatttaaagtagaataattgaatctttcttttctacttttactacatctacatccaattcatcatcaaattctttaaactctcttgcatctatgtcagtaatataactctttattaccttttccatatgcatggaatatgtcatgtgtacattctttttcgaaagcatactagaattacagcacatgtaatgtatcattttagcgatataatccctttctacaggttttacacctaatggtagaatttcaagtatatatcgctgaaaaatcccactacaattaagtgaatattcaccagtgctataatacatccctttttgatctgcatataagccaatgctatctagagcatcatcacattctattacaccgtaacttggtacatcaaaacctgtatttattctaataatatttaaatttggaacctttaacacctctggaacaatatcaggtaaaatatctgtattaatttctttattttgtaacttttttatccaataccttctcaaatttgcatctacaatgaagtaaacttgttcattttgttcttttgcatattgtacaatttccattaatgtttcggaaacatattgtttaaaaagagctcccatatcatttctctttgatggttgtggtaaaaatgcattatgtttatttatatttaataatacgtaatcaatcgtttgccattctgtattcccatataatttatataaaatttcttttccttttatttttgaaagaataggtaagaaatcaaatttcgatattcgttcaattgataaattaacatatatacaaggtaaatttatcttattccaactacgcttcaaaaatcctttttgctctaataaactaaaaacactatttacaattgttttacgcgatacactttggcctataaataaattaataaatgttgaaatacggtttgctcgtgcaaatccctctctaatgatttgttttggatcaattttttctcgtccatcacaatttttcaatgcgattaatgctaatgtcgcatcactgcgctcgcccgcggtagcatagacagctttcgtaacatcatctacaagatttgttttatatttttggcaatattgcattttatatggattttgtaacaccttttcaatattgtatctcacaacctttaataacactggaaaatctgtattcaatacgtaagtattttcaccaactttagtcaaaataatttcactatcaagtaatgcttgttctatttccagcactatattttcagaccaaacctctaatgttaatgtctctaatccttttggtgcaaataaaggaaataattcatttttgttatttgttgctacctttttacattctggaagtattgtgaaataagagaatttacgctgaaattctttaaataaatactctctttcctttacttttatacccggttctattttagtaccttgaactttataaattctctcattgtatggaaataacacccttttattttcccctacaatataatctttcggatattggagaatatggtctaaatccacctctccccctatttgaaaatcatcttttaaatttctaaatattttaatccatttcataccggttgtagcttgttgtatttttagttttacaaaccgtatttttttattatttgacgcaaactctgaggtagaaatcaatatcatgcctcgtttccgtcttaaaagtaaaggaatatctggatgattatattcttgataaaatctccgaatccctattgaaatatttaataatggagcgttctcaccaccgcgggttatgcattgaaatcgatatacataggagaaaaaatcttgtgttttttcatcttttatcggctctgacatcgcctcacaaatattttgtgatctcagaggagaaaaatagaattcttcttcatttgtattttctaaatatataggacgctcacaaaaaatatgtgagattaaagcgggtatccacttagaatacgtttcattatcatgtagtactggcaaattagaaatcaaatcggattgccattcatattttggtggttctactaatctatttggcttccaatcatgaataatctcataccaactttgaaaaatataatcgagctgctcttgtttaataggttcttttgatacaatccatggtgtattttcatttaatacgtacggattatgctgaataaacaatatatctgaaaacatatcatacaatctttcattcaaacgtttcaacttactcgttaataaaaatgtcttataatgtatctctacgatgtccagccattcaataggaaagtatataaatgataccttttcatttaaaaggggttctactatattttcaaatgttagcagccttaattttttcataaaatgattccttcctttcttcagttgtcttgattatcaaaaagctagaacaatagttacttaatctaatccatttaaatcaagtatttaaaagaaaagtaaaaactatttatctgaataaaacattatcaaatcgactcttttaacaattaaaagtaattatcatatacagcacctcattatatttatattttaatacatttaaattatacaatttatataatgtattgtacttatcatttacaaaaaatttacaaaaaactaaaaaagaacaccttaaatcggcgctctctttacaaatattaagcgttatgtaattgaacatatagataacagtaatcctccaaatgaaattgttcctagtaaacctactacaaatcctgttaaacaaatacaatcagcaagacaaatagaagactgcgataatggaacgaatgacctacttgtacccgaaccatattgttttatcttctcataattcatatctaacattaaatgtagacatgttacaccatcctcaatagtatgtacagattctttttctaatcgctccaataatttactatcaaaagcaactgctagagggtactgcttatccgatttcatattttgataaattagttgcaaacgagataatatattatttttcttcttttcagatgttactgtacatttcatattattaaattcatttaataacagtgataattcatctctttttccgtataaatctttagctatttttctctttagtttatacgaatggaaaatagattttagttcaaccatattcatacacttcctaattacatagtatttaccctattattttgtagataaacagtactttttaatcttatttaaaatacacttaagcaacttattttactatcgattaacattacattaaccttacacggttgtaataaaatcattagctagaaggaatcaatgcccaaactagacagatatttaatgataaaaccataagaaaaaaacaatgattagattttaaatctagtcattgctttatccatcacatcttgattacatctatatatcttattgttactctttcacttgaatgattgaatatatccattaataatggctatattctttgtcggcacgtacatataactaatgttttttaattgataaagtgaaactttaatcagctctcaccaatcgggcttttatgggcagtccgccacctaacttctctttgctctcgctgaatttttttggggatgttactgcccgcaactagcaagatagatgttatcaatattcatacgttacaatagtaccggtagtatcagtaaaaccatcaaaacagttagagcaaccaccacagccgccacaaccgccacagcctccgcaaccaaaacaaccgaagcaaccaatacaacggaagccaccacaacggaagccgccacaacgacctccaccacaaccgccacaacgaccacaaccgccacagcgacgagcagcatcttcaatatagtaatatggatattggttttgctggtcccaatagacaatatttccagaccggtaatcattaaggcttaacgcttgtagttcttgttgaaactgattcattttcataacctccgtttataaaatacaacctcatcgatacttccctatattcctgttcgttacatctaagtagaaatagcgctataaactaagttcaatacgtacaccaacaaagtatgacttatcactagatgatgcaccttgttcatatacctatttttactatgggctcatttttataaagtgaaactttaatcagtggggttttgttcatcccctacctaacttctttgcttccgctgaattttgaggtggggggcttactgcccggcaaatagcgggataaataaaaattaaaaaatatgaattctagcgtcatatcttcatacttactaagttcaattaatttctcaacaattatgatgccatatcctatatatttccgtctgctgcttagatttttctgtactgtaaatggctttcgctataacacctccaagtgaccggtttctatgacggttaagaaattccaacaaaaaaaagccctaattagggcttttcattctatttctccagcaaatctctatatgaaattgctaattgaaaaaagacacatttagattgatgcgtctttttttgatgcctcttttgtgaaatcatataaagcaattgcgcctaaaagaacaagtatcccttgaggaacatctagcaaaatagttttccaaatttctggaattacccatttaatatctgctgctgtttcaagatatgtttggaaatagctgattgtaaaattaattatccctaaaaatacaaacaacgataaaccaaatcgaattaatttcttatttgtaaacatataacacctctcaaaattcattggttattcctgcttttgcttctttatatttccatatctctatatctaattttaacacataaagaactcaaaaaaatacgatatgcatatttgcatatcgtattaacaacactccatgataatttagaaattcctgcaaagaaaaaacaactccgttacagctaacagctcgggtttcttttcttatttaacttcataccaccaacatttacgttctttgattgtaaaataaatgtgacagaagtttatccagttaatgcgtagacaagtaaatgagctaaattatcgatattctatttcgccatttccgtagcactaatgactttacgcaaatttgacaagaaaaaatatatagctaggtatgatccatacctagctataacattacttctattctttatccaattacgtcttttacgtctgtatccactggccacttttctaatgtataagccatttcccaaaatgaatattcatattgactgctaataataaaatgctgtttcatacgtttgcgatctgcctctgttactttttcagcgatagtatctaaacgtgtaatttgttcttcaactagcgtacggaaccaatcagatccataagcagaaatccattcgttataaattggctcttccggctggcactcttttaagcgttcgccaatttcataatacaaccaatagcaaggtaaaattgctgcaatgatatctcctaaatgcccttcatacccagcacgatacatatgtgaagtatacgcatatgcagttggcgcaggaataaaattatctttttcttcttttgttatccctaatttcttcgcaaaattctcatgtaaagataactctgcctcatatgtattttgagcatgatgtgccatacgagctgtcgtctctaattcaagagctttcgcagctcctaaagtttgtactctagcaaaatggctcaaataatatgaatcttgaagcacataataacgaaaactagctaaatctaacgttccttcaccaagtttttttacaaaaggatggttaaaactcgcttcccaaattgaatctacttctttacgtaacgattgtgaaaaagtcatttaaatccctccaataatgtataaaatataagtatttatccacaattattaaagctgtaaaataaaaaaactttctttacaggcgtaaagaaagtgaaatcgacagtatttatttactcattaaatagcaacgtctttcccacttccctacgctggcattaaccagatcaggtactaagagtctcaaaatcacatttgatctcagcctataaaaggcccccctagtggataaatattttgtttttataatgtattcatcatagcatacttcgtgaaactgtcaaaaaattagttatataattcccttaaaacccttcttcttttctaacttttaatgatgtttcaataatcatatctaatagttcgctataactaattcccgccgcttctgcactttttggcaataaacttgattgtgtcatccctggtaatgtattaatttccattacatatggaattccgtccttcaccatcatatcaactcttgcataaacactacattttaatgctttataacaagcaagtgacgctttatttacacgttcattaatttctactggaagttcgatgacttcctcaactgtactagtatcatcatattttgcattgtagtcaaagaactcggctgcatgtcgaattgaaactataggtaactgttttccatccagaattgaacatgtaatttcatcaccttttatatacttctcaattactacttcagaatcccattcgaatacagtttctagcattgagatcaattcatttttattataaacgattttcactccgacactcgatccgccagagtttggttttactactaatggaaatcctaacttatctaactcatcaagatttagatcctccatttttgtaagttcaatccaatctggtgtttctacaccttcataacgtaaaatctttttcgaaatatttttatccatacatatactgctagataacatattacttccgctataaggaatccctaaactctccagtgttccttgaactgtcccatcttctccgtattttccgtgtaacgcgagcaacgcaaagtcaatgtctttcgctttttcaattaaatccactttttcatttaatgtaattggaactatttcatacttatttttatctaaatgagcaatcatttcattccccgtcataattgaaacttgtttttcagacgataccccgcccataataacaccgattttcattttctcaactccaaatttcattttttaatgtatcaccaattattttaattccccgaactatttcttcttctttcaagcgcgaaaaccctaatcggaaagtgttcgctccttctccatcagagtaaaaaacatctccaggtgaaaacgtaacgcctttctcataacacttttgtaaaagtgtgcgggcattcatatgctcttctagttctataaataaatgaagtccaccatctccagtcattcttttgaaatgaatgtactggttacatgccccgacagctaactcatattttttcttataaacagatcttgccttttttaaatatttctcaaaatatccctcatgtaaatattgaaacagaacagcttgatctagcgtagatgtgtgaatcgttcttgctctttttacgctttctaaataatgaatcagctctttatctgcaataatccagcctacacgtaaaccagggaaaagtacctttgaaaagctactaatataaatgacattattgccagctcccgcaaaagttaataatggagctaaatgtgaacctgaataacgtaattcttcattaaatccgtcctctataataggaacgttgtattttgagaataacctcatcaattccgttcttttctctgaactcgtaacaataccggttggattatgataagaaggaattaaataagcaaaatcaaaatctttttcacgcaagcttttttcaactttattcgtatcaataccatcctcattcatatcaatcccatgaacttcaagtccatgtaaacggaacagctttagtgcagcgtggtgagttggattctcacaaatgacacgaccagatttttttgataaagaagagagtacaatatccaatccttctgtaaatccatttgtaattagaatatctttattcgaaatgtctacacctttcatttccatgtaatgaagtaaataattcattaacggtctatatccctttgcatatccgtagttcaatacgatgtctccttcaatggacatacgagtaagaaaagctcttttgaaattttcaacatcaaatagcttctcatccggggctatactattaaagacaatcattcccttttcccaacgaacaccatgtttcattaaatctaattcatccgctaatgcggtcactgtattaagtttatttttccaatctatttcaacagacgaagtgttagatatatccaccttcgcaacaaagttcccttttcctttaactgcataaatgagtccttcttgttctaaatctgcataagcagcgagtacagtgtttctactcacacttagtaattcacttagttcccttgttgatgggattttttgatccccgagcaaatgccctttcataatcatcttcttcaaataatctttcaattgaatataaacgggacgatctttaacaactttaaaatccttaaacaattccttaccccctgcaatcattttttcatatttatttcattctcaaaaggtccacgacatatgtattttttataaagggcggtacggtcttacaaatcttttcgatataagttaatcacatcttttaaagctgcagctgcagcgcctcgtggattagaagccccaccaattgtagtaacttgtcccatcgtatctgtaaagaacgtaattcctttttcggtcccatttacttttgctaacggatgatctttttctatttcgcacggttcaacatttaaattcacattgccaccctcatccttatatgttgatgctattaatttaataattttatgttgttccttagcatttctaatttgctgttttgtaacgtgctcgattccttttatatgtatatcagtaagtgttttctctgtttccattaagctgtttgtcaaaagtaacaatttacacgcactatctgaaccacttatatctaatatagggtttgtctcagcaattcctttatcttgtgcttctttcaatgcttcttcaaatgtcatatcttcctcatacattttcgtaagaatataattagttgttccatttaatattccttctattttttcaatactgcaaccggctaaactaaattgtccgatatctagggtcggtaatgcagcggctgttgcaccgctatatcgaattcgtacatttgcgcctcttgctgcttcatttatttctctccagtttgtaacgagcgcccctttagaaattgctactatatccatctgtttctcaatcgcttgtttcatatattgtttccctggatttccatctttaagatttgtaactgttgattctaccaatacagtaccacttatgctagttgttgcacgttccttcggatgatactctaaatatttttcaattgcagcggtaccgccaccatacatcaataaatgatgaagtgataagccgtcttcattatgtattgcaatatttctccctaatacgccacttacaactaattgaatcccatatgtttcatatatatatgaatatttttcatttaataattttataaactctctgcctactgttccgtatcctgataatacaacttgaattttcataatatccccccatatttttctaccaaatccctctttcaatataatataaagcgctctcgaattccatcgagagcgctttattattacctatttcggtaaacgtgatagcttttcagcaattgttctataaaactcttgaatgctagaaaaacctaatgagtctgaaacacttaatcctaccatatcgagatgatcccaattcgctttcgtttcgatatgattccattttccaatctgtaatgacccattattatttacagcaacattagaagatggtgcaatcatagaattcgtatttactacaccatcattttgccaccaagaagtatcaactaacggacggttttcttcatatctcgcataagaacctaagaaaaatgcattccccatcaacaatttattcatcgtaatatgcggtaaatgtaaacctgttataggtgctgcttgtgatgcatgtccactataggataaataatacacatctggttgcgtctttacccaattatttaactcctttgcaccatctgtacttaaatcccattgacttatatcttttgtatttttccaaagtgaactatttagaatacgattactatattggaaaaaggactctccagcatttttctttataccccattgatccaatttaaaatcatataatgataaattattgtttcctccaaagcttgcagctgtaatgagtaaatctttaacgaacggcagtagaagactaccatccgcaagtgttgtaccgttgtgaggggttgctaatgttgtaacactatgaacatatgattttccgccttcaaatagtggtgatattttgatgtctgggtgatttttcacataattcttttcttcaaaactaccttcttttaatagctgtactaatgttctaatcgtttgtccacccatgctatgtccaactaaatgaactttatttgtttcactccaattcggcgcaaaaccactataagttctgccaaaacgattatgtccatgtttctcagcatgtacggcaccatagtctactgtcccaccgctaatttgtgcatacaattcacatgcacgatcccagttactagaaacaggtccaacagctgcggtatgtaccgtataaccattgcgtttcaaatcttcctgtatatcatgaacaccaccccaatattttacgccaagcatttcttctctaccccatccagcaaatccattcaccaatatgattggataattattttgttgcctctcttcagcgtatgatattttcgctgcgaatgaacatacggtcactaatgcgaaaaaacatatttttaaaaataacttccccatactttctccccctaataaaacgtttacatttttcttttttaaaaaaattaacagaatactttaacaacttaaacataatgtaaagtattttatatacgttgtatatatagaaaacatatacaaatgttgataaatattaattcaagtaaatatttactttttacaatacaacttgtaaatctgtttatttgaatttataattagatatagttgcctcatgttaaaaagatttaaaaaccataagaaaactaatctcattgcttgaaaaggaggaaaaagcatgcaaatcggatcaaatattcatacattatctcaacctactaaaataacttcatctactcttgagcataatactatctcttctactaaacttgaaagtaagaaaataaatgatcctatcaagtttgatattcgttcatctgaaaaagaaatgaaacagcctgagcataaatttaatgaattagatttatggaagatgttaaaggataaaggtgttcctttatggattatacttgaaatgctacaaaaggctcgtaaagaaaaagaagcacaaaataattcagttcaaaattcaaatgcgattgaagaaacgagtgagactcgattaaatgaagtaatgtaaagcataataattgatttgtctataaactaaaaagagttcgaagctgatgaaatttttatcaacttcgaactcttttttaaggtttttcgccaatcgttacaaagtgaaaagatacttctccttccaaacctttaattaacttttttactttgacattttcattaaccaatgtattatctgtcgacattttaggtttttcgtcacctagtgattttttcaaatgaagaagatgcattttcatttcatttgcctttatttctttataaacactattttttgctacaatcatataccattccgttgaatatttacgattgttacctatccaagcatcactatcgtatgtaacaggaatctcttcctctcctattttaatacttttcatagtcttattgtcttcacttgtaaataatagcgccccttctttggggaatttcggtaacgtatctataatataattggagccattatcttgttttcgaaaaagtttttctttaatcaatgcttgtgctgtagattcatttaaaattaagacatttccatttccaacttccccttttttcacagaaaacacttcattttcttccgtaatttcctgataacgattaataattggtgaaatattattttcatctccaataattaatacaccgtttgcaggaaatggattttcctttttagaacatgcactaaaacttattaataatagtatcgttaacataaaaatagttaaagttcttttcatctcgtttcctttcatcatacagttcatttttctacatactttattgtagtcttacaagctaataaattctattgctccataaccttataaagcttttgcagataacgccaacgggttataaagaaatataaaacttgtatacatataaatgaaattaaaataacgatagagctatttatgatagaaaaatcgactaattgctgtaatgctatataagcgactacagtatgaatcactgcaacgacaattggtaaaaagaacattaataataactgtctcgttacaactttttttaactcacctttacttaatcccattttcgaaatcattttatattgctgctgatcgcgatccaaatctgtatataatcggaaataaataaaactagcagcgaatgtaaagaagacgattccgactaaaatacttaccataagtaataaaccattcttttgctttgcttccaacaagtttaatgttaaagcttcaaagtagaaatctctgtccctaagatctttatcgaatatactctttaattgattggaaatctctttcgtttttatccaatcatctacaacaaatccgtaagtacgatatggaatttctttattaactgggtcactagtaagaggcattccatcatatacctgatcttgaacagcgatataaatagttctagaatcgtgtggtaaaactaaattttctacagcttttttcacatgaaatgtctttgtccagtcaccttgaatgacttctatattctttttatactcgccatttttaaattcttgtttttgtgatacgactccaggaattaataaaatttcatcttctttttcaattttttcttgttgatagcctagtgctttagcaagatcgttgtattcacttaacttcattacatttacgccattttctgtgtatatatatgaagatgaagccattcgatacggaatattagcatcagaaaggtgcttttttataatagaaagatttttattcaatactttgtcattttcaagacttccatacaaaaatgtatagggatttgtcatccttactaaatccctatttccaattgcggctgttgtaccaattgctgtaaatgcaactgctgaaacaatagatactataaaaaacatcgttgcattatctttcatacggtaaattaattcagaaaatgttaatatatttgttctctttaaaaagaaagattctctccttttagcaaggcgcaatatatacacgctacactgtgtatataaaaagtacgttcctataattactaggagcacacctattccaagcgtaataaaattggtacttggtatgaagcgaaatactgaaaaatatccataccctatactaattaaagaaagtagcgataataaaactgaagatttcggttcaggttttggcttttcctctgctcgaataagttccacaagttccgttacttttatcattttaaatgtaaataatgaaacaattaaaaacaagaaaagaaatgtgataacagttaataatacagcccgcactggtatataaaaaggtaaaccattattaatcattaatacacttgcacttatcaataagactagtttagaaaatatgagtccaatgaaaatccctatacaaattgaaccaagtccaatcaacatattttcaattaataataatttcttaagctgtctcattgacataccttgcatcattaaaatgccaaattctttcttacgcgtttttaaaaacgaactaactgaatataaaatgaagaaaaatgaaaatacaaaaatcaatccttgcgaaactgaaaatcccaatgtaccaaatgcacttattgttgcacttgtcgatttcaactcaccttgtaaatcaggatgaaataataaaagagcatacgtaaagaaaatcataatagaaaatgcactacttaaaaaatgggcagcatatgtacgcttattgcgaaaaatattattaaatgcgaactgacgaaaagtcatgccttttccctcctaacaaagaaaggacatccataatcttttgataaaaagtttgcctactttcaccacaataaatttcgttatatagttgaccatctttaataaagattactcggctgcaaaagctcgctgcatacggatcatgtgtaactaacatcatcgttgctttttcttctttatttagagtatccagcatctccattacatcatttgaagatttagagtccaagttccctgttggttcatctgcaagtaataattgcggcttatgaacaattgcacgagcgattgctgttctttgagcttgtccccctgatatttcaaacgttcttttattcaatatatctgtaatatttaacttctctgcaatctcttccaatcgcttgttcatttcttgcacggaaacaccatctaaagtcatcggcaatacgatgttttcttttacagtaagtgtgctaagaagattaaatgattgaaaaacaaatcctaattgttttctgcggaataacgctaattcttctgatgataattgaaaaggatttgtgccattaataaatatttctcccgatgatggagaatcaatagtagataccatattcaataacgttgtttttccgctacctgatggacccataattcctacaaattcaccttcttgaattgataaatcaatatctactaatgctttataaggtactttccctttatatactttactaatactttttgcatgtaaaatttccatgtatattctcccttcatttccactgctcactataaagtgtaaatgaattgtcttacagctcatattgattcatctttcatttaccttacacgcttgtaagatttctaaaaaaaatgacaacataattatttcaaactaaaattaacgcataactatcttataataattgtatagtagtaggaaatataatgtataataaatctttattatataaatgagaaaagaccgattgctatcggtcttttactaccaaacgttatatttttatccactcagattttctcaatatataatgattatatatttgattttctatcctctgttggctcttataaataaacccgcatttttcaataactttatttgatgctacattgttaattaaagcaattgcgttaaggacatttaaatttgtttctttaaacaaatagtcaattaaacctttagtcgcttttgtagcatagccatgattttgatattcatttgagatagcatacattatctctctgtttggtgaagggagttcttctttcatacctgtgcagcaccatccaatgagttcatttgtagctttcttaaatattcctagctttaacatatgattatctatgttattcgtagttttcactgcatcaagaaatgctttgtttgctggtatttcataatctgcaatccaatccaccctttgttctttcgttgatttccagtctggtaaaaattttgctatttccggttgatttgctattttataaatactctctgcatctttgaccgtaaactcttgcaagtatatatctccacaatctattttaaataacttagtgaatctctcttctcccatgttaatcccccttatttacgttatagctccttaatctgcttcgtaagttccataaaccgttcatccagtgctttatattctttgtctttagaagttaaaaagcttaattttcctaatacttcttgtctctctgtttctaacgttaaacgtagctcttcaatatcatctcttgttttagtaggttcttctagctgcttttgtatcgtattgtttgaaaacacgagttttgtgttagttgttttctccagaaaatatcgatcgtgagatacaattactaatgttccgttatactcagctaatgtattttcaagttgttcacgtgaaggtagatccaagtgattcgtcggttcgtctaaaatgagtacatctttttcatctaaaatataagccattagcttacactttactctttctcccatactcatatgctcaatcggctctttccattgagacgcttggaatcctaaatgtttcattaaattttggacttttcctctttcttcaaacgtctctttaaaaaataaattttctggtgttttatcaagcggtaaatcaaaaacttcttgtgttaaatagccgatgtttgctgaaggtgaaatccatatttctccttcagcagtttccgttcccataatcatcttcagtaatgttgttttcccactaccgtttggtccaacaatcgcaactttctcaccgtgctgaattgtaaaattaacgttttcaaataatactttcccatgaaagtctttttttaattgctttacttctaaaaagcgttttcctacttttttgttcgcttgaatagaaaactcaactgaatactcttctttcacacgttctactttcgttttctccagctctttttcaagtcgttttcgttttgacttcacttgtgcatccattcgcttcgcttttacacgatagaattctttcacaccttcttgttttgtagactgcgcgtgtgccttttgtgaccatgaactcaattcttttatatgtgtttctacttgttctatctttttttgttgtttttcatattcacgctgctgcgactttcttttttgctcacgtgctttcatgtagctcgtataattaccactatgctcaattaattttttgtcctcaattgaccatatttttgttgcgacaacatctaaaaaatatcgatcatgcgatacaacgataactgtacctttcatgttttttatttgtttaatgagaaatcccgtactgatctcatctaaatgatttgtcggttcgtctaatattaagacattaggattttcagcaaatccttttgctaatcgaattttcagcttttcaccaccacttaaagtatgaaaatcgttcgttggcacgccccatttcgcaagaagttctgcttcttttgcaattacatcattactaataaaagattctatttcttgctcaacatatgcggttgtcatattcatttgctgccattcaacaatcccttttgaaggctcaatctttccatttattaattgaagtaacgttgatttaccagcaccgtttttaccaattaatccgataacatccccttgttttactgtcacattcattttctctaacaacatattttcttttatttcaacataaacatcatttaatgttaatagttctttcataataccgatccctttcattaagggagaataaaaaaatcctcccaaataaatttggcaggattagtcgttaaaatatttacacccaaataagctattacataacataaatagcaataccgttctatggaaattgggcagactaatcctattttttagaaattgaaatttattgaatttcaacatttaaaaataagattagttaatcatcgtccacccatcattcctttctgtcattaataaccatattgtaccatgataatactgtatgcgtaaatattattatttgtacttcaaaagcaattatttttcttcaagtttatttttacaatttcatgtgctcatatctttaatttttactaatttgtatcatttattcatatgaaaactttttaaaaaatacaaaacaaggctaaaaaacttatctccaacgttctttagccttgatcactttttacacattaaaaaacattactcgtactaccgtacctttatcaacttctgaatggattgctacactatgtcctaattgcttcgtaatttcatatacgagatatagccccattcctgttgattctttaaaatctctaccgttttctcctgtaaagaaaggtttgaagactcttggtaaatcttgcttcggtatacctacgccattatcagcaatttcaagtataacggtattaccttccttacaagctttcactttaatcttttctctactacctgatgaatatttaatcgcattcgatagtatttgcccaattaaaaattgtaaccatttcgcatcactttctacagtaatgtccttatcaatttcaagctctggatatacaaaattccggataaagaaccgtttatgctcatgtaccgaatcattcactattttatgtagttgtactctttctacataaaaatcttgtgtaaatgcttctaaacgtgcgacatacagagccatttctaatcccttttttaatcgatcagtttcctcatttatactttcaaaacgtgaatctacttcatcctgtgtaattaattctattacagataaaggtgttttcatttgatgaatccactgattcataaaggttaaatggtcattattttttctctcttgcatttgcagctgattttgataatgtcgatattgcacctcaagtagttcttgaagagcagccgatacagctgcaaaatcagatttttgaacagattcatgttagtgataggtaaggatttgaagttatctctaccttttcccccactccacaccgtacgtgagactttcacctcaacaagctctttcttcatggcaggtagtttggcagagcatgtaccataggtcaagccttttcctgtctctttgtatgcatgatcccataaggataggaaataattgaatacaaaacgagaacacccaatcgttttgttaattagaattgcttgtgcttgatttggatagatacgaaacttataggctttattcatcattatttgattcacctccatttcggtatatgaccattatacaccaaacgtacattcgatagatagtggagtaatactttctatatgtcgaacaattaagatggcttcccgccatcccttgttcaaacccaattcatctcccacctactcactggactgtgacccttcacgctccttgaggaaggagtcttcttggctaaaatgataaagaattatatattaatccacctttaatttttcttttacctttgtagggagttcaccttttttcacttcttcccaagatttcacaccttttttctcagagtaatatatacgtaaaaacgcttctttacgaaggttttttaacgctgtaaactccatttctttctctttaccatccttatcaaatccaggtaatttatattcgtaagtcgtatccccatttacatttttctcttttaatttttcaccatccttggtaatttgcacataatatgtatctgtaccaagacgatttaaattacacccggataacaacacagtaaacatcacaaaaaagctacacataagcactattcgtttcatattattcacctcatatcttttctcacaaaaattatatcctaatctattggctgccaaaattcatttccattacgctaacattacgtttttgtaaggtagtaaaaacagcttaaaataaaaaggatataaattcatatttctattgaattcatatcctttgttcttattgagtaaactattttgccccatgcttaataggaggtatttctattattctgggaaaataaagctagagtcctctccactattagcggtatcttctttcgggaatgtaatagtagatccttcatttcccttatttcctttatttatttcttgttcctcaggaaatacaatggaagaatcattacctaagtttggtgaaaaaccaagtttagataaaatagcttttaagtcaggtaaaacaccaattttatcagaagttggatcatttgatttcgttccggtgctagaatcacttaaaatatccctaagttgacttggtgtatatactctcccctgattattttttgctattccttgaattgatgctgcagcaccagcaataataggtgatgcgctagatgttccagcaaaactagatgtatataaatttgttataaattcacttggtttagcatctgtagtatctactgcattcccccatccatacacatccactctactaccgtaattagagaaatatgaacgcttatgaggaacccttgcagaagctgccccaaccataattgcccctgaatctttaaaatcaggactattacgatttaaaacttgtttaccattacggtctctaaattgatccaagtcatttccgccatttgcacctgcttcaataataataattcccttatttgttcccatacgaattgcatcaaatatgtctggttttacttccacaggaaaatagttcttatctccatatccatcgtaagttgcttgtgcctctagtaaaagaatatctccagcttgcatattgttaaccgcacttaaaatagcatcagctgtattataatttccgttatccctaatctgagatacaacctttaccttagctttcggtgcgatcccaattccacctatattattatcctctgccgaaacaattcctaagactgaggtaccatgatcatggtgctcgcttttattctgtccagatatcagttcaatcttttgattcactaaatcctcatgattaaataaccacccatactccatatctacgaaagtagttccttttccatctccaccttttatgctccaggcataaggtgcattaattcctaatggtgctggttcaaggtaaccttgtcttgtaagtctaggctcatcatatggattaacagataagtttggcaaacgctctgctggtggcgcctcttcttcctgtaaatacgccgtttcaacaagagatgatttttcaaattttgtaagtaatgcttgtacatcaatatcatcttgagtttctacaatataatagtttagcaaattagaagaaatatgatcggaatcttttatttctttacctagatttttaatttctttaggatttaaagaattaaaaagtcgatttatagttacatttggatattcagctaaaattctaattaattcaggatcttgtttttcttctttaatgaatttttctattccatcctgatatggtaaattcacttcatttttaaattttaaaattaattgtttagtaacttgcttatgtacagtagaattcaattgcttatttgaataattataagtagctgcgtaggcaacttctgatttttcacttggaagtatactgcctactccattaaatgctgttaatgcaattgaagaaactaaaattcccttaaaaattttcaaaacatgcacctcttcttattagtatatagttataaaaaaatgtatattacctaatttctttttatacaaacgttttatatgtagaactatattttcaactccattcattctttaatatttgtttatacatcattaatacaaccaattcataccaacaactttattaattcagtcgcattactgtaaccagtatagttacacctcgtgaaatagtcaaccttaaatgcaattttgcatttaaaatcatacatacttctaccaacttactcccaattatttcaagagaagttgaacttctatcattttgagtaattgcatatatataatataaaacatataaggggggttaaaacgtggtaatctcaagacaagattcctggactgatgataacgatttacttctcgcatcaacagtacttcagaatattcgtaacggtggaacacagttagctgcattcaaagaagtagcaaaactactagctagaacacccgcagcttgtggatttcgttggaattcatatgtgagaaaacaataccaagaagaaatacaactagcaaaacaagaccgaaaaatgggaaacaacattcccctctccccatcagaaaaagaaaaaaactctttgtctattacattagatgatattattctctttctacaaaattataaagatgtgaatgaattgacaaaattacaaaatcaaattgaagatttaaaaacagagaatcaatctcttctacaacgtatcaatatgtatgaagaagaatatcgtatgttactgaaccatatcgataagacaagaaatttaattgcagtggattaaacagcataactataatgactttccagtaggatcttcgcccgccaaaaccaccatcaataaagaaaattcagactattattggtaataataagtaaaatacacatacataatgtatgtgtattttactttgactattattaaaagaaatatttagtctatgttacatcttttctaatatttcttgcctttcacaccattttgttagcttttctaatgcttttttagataaacgttttgttttataattacaaaacctagataatgtagacggagaaatactcatttcatctgctatttcacgaatgcttacctttttttcattgtgtactttcagtattttgtcacggatctttttctctatttgttcgactgattctacagtcttctttatttctttaacaactgttacttccggtaactgctcttgtggttcctctatactcttctttcctattaccctatccattgactgtaacatttcttcaggtggcaaaatcgttattcctaagttagtgtaataatttttaaaccaattacgtttcccaatttgttgttcatccagtggatcactatactcccaatgagagattactttttcattttctaaatccattagaacgttttctaactgttctctaatacgattaggcttccaatctttcgggatatccattactgctagcaggcctttgtccccacctatagaatatggctttttcaatgatgaatacatttgtctaattctccattgccatgttaagtatcgtattaaccttttatgatatttgtgtctataactattgtattcaagtgcttttttagacaataatgctgttgtattatttgatccgtataaataattggttaaaaagctgcctggcttaatacgacaagattcaatacccatatattcatttgtaacactatgtctccacaatacaaccgaatctaatacaaataatcgtttaacaacctcacgctttaattctagtcgttccccttcatcttcacggtcatttaatactacgacttcattctcatcatttaaatagataaaaatacttgctaaagctgcaattctttttgctattttaattttatcttccgctctatagtattccttatttttgactactgtttttggaatgttgcacatctctaaaacttgctcataagaaaaatcaatgaattcgtctggagattttgcttcgtttatccattgtattgtaattgcatctaaacaatctgccgttaaatcatccatattactcattacatcatcaacaagagtattccatcgagctgcttcttctatattagtaagtcttaaatcttcatctttgtgtgaagaaagctgggctacaccattagaagattttgtttcaataggatattgtaaaaccttactcagttcatcttcttcaaattgattttttgcaatcccatctcttagcttataataaacagcagagttatttacctcataataatcctcatggtttactatacttgtctcttctatattttgatcattttctactattatggaacttgaagaagctatattttggaattctttgtctataaatccttcaatttctttatatatttcttccttataggaatcaattttggcataaatttgtactaatgtagtaccggattcttgttttttctctagccaagacactaatgcagtaaatgatggggaagcatgaggtgatgtgagtactttattattattgttttcaacatctttaaaatatgcattccacttattccatactagctcgttagttttataaattggctcagagattaacaatgcatctcgaaacatttgtaataagttatccactttcttttcctccctaaaccatggatcacaattaaataattctcagtataaaaatcttaactactattatatttaatttattgtaacagatatttacaaatttttgtttctttcttctctattctgcttttcttgcattccttttgcaactttcttttctgaacttgcaacatgctgctctttcttttccctatttcttcttcctacatttcttttgcgccttgctttccttaactcctcaacttgcaacatactgctctttcttttccctatttcttcttcctacatttcttttgcgctttgctttccttaactcttcaacttgcaacaggttgctccttctcttccttatttctacctacttgcatttcttttgcgctttgctttccttaactcttcaacttgcaacaggttgctcttcctcttacctatttcttcttacttacattccttttgcgctttgtttgccttaactctttaacttgcaacaggttgttcttcctcttacctattttcctttactgacatcctttttgcgctttgctttccttaactctttaacttgcaacatgctgctctttcttttccctatttcttcttcttacatttcttttgcgccttgctttccttaactcttcaacttgcaacaggttgttcttcctcttacctattttcctttactgacatcctttttgcgctttgctttccttaactctttaacttgcaacatgctgctctttcttttccctatttcttcttcttacatttcttttgcgccttgctttccttaactcttcaacttgcaacaggttgttcttcctcttacctattttcctttactgacatcctttttgcgctttgctttccttaactctttaacttgcaacatgctgctctttcttttccctatttcttcttcttacatttcttttgcgccttgctttccttaactcttcaacttgcaacaggttgctttttttcttacctctttctccttacttacattctttttgcgctttgtttgccttatatttctcaacttgcaacacgtttgctctttctcttacctatttctaatcaacttgcaacacgtttgcggtattctttccctatctctttcaacttgcaacagtataatttatttctcaactaagtaattctaaaaaaaatcatgtcattttaaagttttcaagctatttttctcatattttttataagttacatacataatatgcaacatgtttgcggtatcctttccctaacttttctatcatcttcaccataaacctttatataccaagggtttaggtgcttttccatttacttttatacatatcatccaacttgcaacacgtttgcggtatgcatgcccttatttttctcacaagatgcaacagtgtttgcggtatcctttccctactttcattctataaatgtcaacaagtccttttatatcaagggtaattattacaattcatttttaatcattacgttcactaacttgcaacatgtttgcggtatcctttccctaactcccctaccattttcactataatcctttatataccaagggtttaggtgctttttcacttacttttatacatatcacacaacttgcaacacgtttgcggtatccttaacacaaaaaaaaatcatgaaattctcttatcccttgatacaactagcttcataagctgttgcaagttgctaattttcttcttaaaggagcacctttcatcatttttcgatttgctataatcaaaattggtatattttatagtattttgacatatatttctgaatttgtagaacggaggtgaaaaagatgggaaaatcatttgtgatacgtaatcaacgtagcttaaatgggaaaacaacaaacgcagttttagtaacactcaaatcttggcaaaagtttgtggaaacatttgaggagaaatactacagctataaagatacatatttagaagatattttgcagcacatgacatacgaagagcgtattgcggatgtagaaggttttgttgaaaaagccaaaccatctttttcacgtcgggcaatgtctacacttgcagaaaaagcaggacgaaaacataaattatacggtattacgaatgctgatcttgaagtgttcttgtacttacataaaaaatgctatacaaacggcgtcattccaaatgtaaccatacatatgatgtgggaagattacaagcaatataaagaagaatttgcttatatccaacactctcaattctatatcgcattaaagaaattaaacttacataacattatctccatcgaaaatggagtagatggccgttatacaatcaaactcactcattttatgaatgaggaaacagaaaaagcaaatccgtacgtatatattagtcctgttgtatttacaaaggatttctttaagctatctgtagcagctaagaaactattcttagacatcgcaatgcaacaacatacggaaacaacattaaagcgttctttagacaagcaggacgaaagaggaaacaaaactcacttcggtgggatgtatcgtttcttacataaaaaatatccgcatcagatccgtgcggttatcgaggaattaacaactgcattaccatgtacggggaatcccctattcaaaatttgcaaaatgcaaaaaggtgtaaagcatacaaaacgatatacaacattatatctgtctatacattcagacttcttatgttcgaaagaagctggagaagaacaacatagggatccatttacaccaaaagctacctatgctcgaaaagcgaaatttatcgaagcagtcctacaagagatgaatatcggtgaactttctgcagacatgaataaattcattcatgtattaaagcatacttgtcatcgtcaaattcgcagtgtaattcacggactacgtgacatggttgatcgaaaagaaggatatccaacgaaaattgtatatacattgaagaaactattgcatcaaacatctcaatatcaaattctcgatacagcagctaaagaaggtatctaccctcttattgcgcagcatataccaaaagagagaaatagcgaacgtgagcaagctatctttaatttcggcctacattattctatgtactctcttcgtaacattaaaaagatgtttaaaaatgtgcatgcattattgaagcagaagtttgcggtaccagtaacagaagaatcttatcaccgtaattatataaaataccaggaagaaacgttatttagaaaatatgcatatgatcagggagtgaatctccatgcatatatcgctttagaaattgaaatgcgtgaaaaactaaaagttcgtggtcataaagaacgcacaattccaagtgatgtacgtgaatggtttattgaaacaattgataaactaccacaagaacaactgcgtgtgattgagctaccaaaacagtttaatttactagagtttatgcgtaccttcgaacgcttagtacgtgctggtgtaacaataacagctccagatcaggtgctacacgcaatggaaataaaataatagtaacgagctctctatttttgaaaaaatcgaaattagagggctattcgtagttgtttcattcatactctttttctactactctatttataaatacaaaatcagaaggacttcatgtaaaatgaagtctttttttatgcacttctatacaaattctcttctagcactatataactctccacatagtgccagggagtattcttctaatgtaataaaacatacctcataatacctacaaaaaatcaaaaataaaattataaaaacagtggatatgaggacaaatatactcgaatgtgaatagtatttttctgacatcattgtaactactagtgttgttgtatatatctaataaaaatcatcaataataatgtgagttatgtgtaaatactgagtaatgttaacaaataactacattttctgaacaaaatgtggataattgaacgttaaatactgcttatttaccaaaataaagtaaatgaagcttatttccatagttgaataaatataaagtaatttgtatcaatttctttccgatttcatgtagaaacatatgattttctttttgcttttttgtagaattgaaagtcttataattattgaatctacggatacattttttactatttatgattttttacgtgctaacatcaaattttcccttgtgggagtagagtttccccctatttttgataacctataatagttttatctttatttctttttaatatataagatatatatttataatagattttacaattactaatatgattattaataagatgtcagacctaattgaaaatatttgtaaaaaccgttataataatggtaattaaacatatcattactcccatgtaaaaggacaaatctatgaatccttattaggactagatttgtctttttgtcattgaaaataaaaaacaacatataaaaaaggaaaagggttgtttgtccgttttccttttttatatgccagcaaccgagcgcagcaaagggcggtagcaggtctttcacttattttttgttataatatatgataagaatttaggtgattataaagaacaagggtattagtatagaagtagcattagaatcgttttctgtttatttagcagaaaatggacgtaaacaatctaggattgaacgttataattacgatattactggtttttataagtgactaagagcaaatgagaagctcctagatatcaaatcatgaagtgaactacctaaagaaaattattaggagtatttctatgcgctagaaaacaaggcacagaatatggccgttcttaaataaattgaacatgtctttagcgatagatacttcagtagatgattttcacccctcataaattcctgatcaatcactaagtgataaggattttattaccgaagcagaagaaaaactattaaaacaaactaccctttcaacaaaaggattaacagaaagacacgttgaatatcgccctcttattatggatagaaacgcttctataataaatttagtagtaaactatgggttgtccttacaagggcttgtatcgcttaatatgagccatatacagcttgctctttaattgttccaggagaaaatggtgtaactaggtctgtttccttaaccaaggaagatacaaagcatctttacaaatactatataactattcctgaacatgtaaggcttagacggtatacagataatcctttgtttatagcatttaattttaatcagggaacatatcgttgagtttacgaaaaagatgcgccaaaggctttgtctgaggttgcaatacaaaagatgatacgacttgaattaaaacgtgaagggttgaatagacatatcttggcgcagcaaatgcgaaatacattcattgtttgtcttattaggcaaggctcttaattactgttatcacgagaggtttagaagtgtataaacaagcgattagctgcttatatatctgtattagcctagatattttgtaatgtcagtgagatatcagcaatcatagaagtgtttctactccaacctaggaagccaagatatcaataggttttgtacggttctctagcagaatctcagcaattgtattacataatagtgacaacggactatcttttccccactttaacctacaaaacaacaatctcgagataaattgacttttttcatttcctctttaatttctctataagtattcatcattataaaacttgccccttcttttttacatagaaaaagagagtcccttgctataggaaccctctcttatgcatatcctctatttttaatcaatcacaatttcatgtatatttagcttgtttaatttttcattatagaaactcattactttttgagcatgttgagccattaatccatcttggacagtaagtgcttcaaaatacggataacgaatgtttgtaacataaccattcagctgcacgtattgttctaaaatcaatgagaactcctcatctaatttacgacaaaatttgtgcagcattaaaaggttatgagttttaggggctgttctaatgtttagtgtaagaaatccttttagaggtttcccaacacattgttgactatggtaacaaataactgaggcagggaaaggtttcatgtgagttaagtacctagcagaatctaaattagattttgcaatgaatagcaactcttctagatcctcagtatttttcatataaaacttgcccccctagtgcaattttgtattccatggttacattacggttagcacgttcttgaaactcttcaggtccatatactaaaatatcaactggtgtttccatcacatcgtaaataccccaattgataagattaatcacttctctttttcttgttcctacaccatccacaataatacaaagatcaaaatcacgatctttatttggtgtaccataagcatgagagccaaaaaggataattttttggacagaagacacggtctcacaaattttttgtactaataggtttagctctctttgtacttcctcgttaatccaaatcaccccttggaaaatagaattatattgacgtttaagtatattatatatgcgcttctcttctccttactattacatatttattttcatattgtgcccttatttcccaacgtccttcaatgcttaataacatttgtaaaccttcttgaagtcttgttagaacccatcatcacagataccttattccttaacttgatgaaggacgaaagtccaaaggtaagtgaaagttaaattaggggttacttgtaatagaatgctttgttcctctgtagttgtatatgaagcaatgttctgtatgtaaatacatctaaagattacctttccagtggtctttagatgtactccgcaatttaagttttttagaaagcctttgtttttaataatgatatcttggaggtagtggctgtggattgagttctacaaaagtaccaggaggtagtggttgcgggttgagctgtacaaaagtattccatgacccatatggaatatactgcataggatttggtgtaaatgatgtatatacctgtagatgacaacacggaactatatgcattaatatttcatctccttcaaaataataattcgttcatgacaacttatgtattttagatttaagtaaagtagtaatactacctaatttttaaaaatagttaaatccaatttactaggacaaaaatacattcatacaatgaatatatttttggatgagaggggatattttatgggatttgaaccaaaagacacagtcttaaaaattgctgaattggataatatccgcttaactaaaatatactttgccccaggctggattgtattcaacagtagtactggggataaaagcgatgtttttatgtctatatctaacgttactggtacagttatgctaaattctgataagagtagtcaagttagtttttcatacatcctaaataacaacaggaccctcttgggggaagtagtgtggaatccggtttttaagattctttatttaaccaaagatggagggttccttactgaatggcgggatattgtatcacctgattctaggttaaagaactatactgtcacgcacacgtggactattccacgcaatatttatgataactttgggaaaattcgtacttttcttagtacctcctcagcaccttggtatccttgtcctaggtaacaaaaattattagtcagattataagaaataggatgtctcaattttaaattattggcttttatcgctaaaaatttaataaactgtcatctaaaaagaaactctaggttagtcaataattcgtatagggtgcagtttctatttcatttacaatatttattatacatgcttctctgcagtgtaataaaaaagacattgaacaaatacgtttaatgtctttttccctctaatatacttgccttgtttatcttgtatttatataccaagtaactgcttctttttggcgttaaactcatcttctgtaataacccctatatcgcatagctctttgaatttctttaattcgtctgctgttgatattggagcagatactgcttgtggttgagcttcagtaggtttgctttttaaagcatctagaacttgatggatatgattattaatggattttgctgaatctttatctaacgcaactttgatcttttcttgcggagtatcaattgttagaaagcctaaccacatccctatttcaaaagatatatcatttatcttttcatgatctactgctttgaatttttccccagtcattgttttttgtccgaacataatgcgtttattacttatggcgtaggcataataaccatcatgctttgttgtagattgataatcgtgcattccgatataagtcatatgtattttttcgccattcatcaagttatcttctaataccttgaagtgttttacaccccacttttcattaaagccagaaccgaatgtattatctatacagaattgatacattccttcagcgcatgacaatggatcctcagcaagttttgctacctttgcatcgattgtagctttcaattcttcgatagtgtccgtacttacacttacaacacccaagccacctgctttatgaaagcaatctgggcatagccatgcgtcagattttagtattttataacgatttaaaccaacctttatatcacaaacaccacatactgcctttttaaaaaaaaccataattttccctccagttatatatattgaatagtagcaaacaaacctaacattctacgtaatattacaatttataaatataagtataacacacctaaaacactataggatgccaaacaaagccttaaccatttgtttctctatagtttaaaaggaaaaaagacattgaaaccaactgttcaatgtcttttttctttttaaatgtttgtatactcaaagtataatttttctggttttccatacatgttaatttcattttgatatacgacagctaatggctgagacatctcaatgctttccacataggataatgaagcagttgcttctattttttctttaatctcattaggaatggatgagtaagataagttattcattttacttcctagtttagtatctgtagcagcttcataataaatttcggtaattaagacttcattatcatctggatcatacatgtatcctcgattaactgtaatcatattatataactcctctcaagtttcatattctaattccttgtgcttttagcattgcaacaagtactttacatatttagattcccttgttcttctctttcgaatgtcagtatgaattgattcttattaccttacctaatagttaaattttgggatttacaataatataaaggtttgattttatagatagtaagttcataacatttaacgtgttaattaatttttcttttgaaagttttaaatgatttcccctattgataatgttggcttatctaaagtaattgcatgttcatatttcatcataaatatcctcttttctaaataaaaagcacgaaatatgtgcgttttatccatatttttttatgctatactctgtaaaaattcatataatctctcccctaaattaaacaaaaagcacaaaatttgtactttctcatttagcatacttttagtcctaaaggtttatgtataagtgattcctaacttgaagacaacacaaaaaggacttcttcaagtcgattaaaatgtgcatagcaaaataagctatatatacactaatcggctcaaagaagccctttcataattgaaacaaaaatataacttgtttctaaaactcaaccacaacacatagggcgtgggaatagacggaatcaattaaacaataaatatagatttatattaaaccatttttatattatattcaattgttttcaatagaacagagataagaaggaagtttatatgcagatcccacatgtattgtataataatgcccctgattcccctgctataaatcccctcttatattcaggccctggtgttacttcatgtactgtatttcaaaatatagtttttcgggcttttgattttgaactaaataacaaagtatttccttaatatttttttcttctacttcaacattttccatataggtcatactttcgttttcctggaccttttcaaaaatagcaataggtactttaactggatcaaatatccccattttactgcctaactttttttctgatgtaccatcatagaaaatttcatttactattacctcattattatcaggatcgtacatgtaccctctttgtatacgtagcaatatagtactcctttcttgtatattcctccaatgaaataactatatttgtatataatgttattttattaacaggtgtcaaagaatattatttcgcaaaatccttgctttgtatagaggtagatacaggattattaattttgttaagtttttttgaatatttcaagctaattataaaataaacaagccacccttgaagcgaaagcttgtaaggtggattagttttctttaaatagctttgtatctaattgtttaatctccccttctgcaagaggttgataaaaagcgtgttgtaatccttgaaaatgtaaagattcccctatgcataacaatactttaccaggaattaaatcaagtaatagttcattattaattttctttgcttgttttttagtagaaacataaataactaagattgtagggttattccctaagtcctgcataataacatcttttcctgactctacaaaagtctgccatctagcaattattcgttttaatcgatccttttgatcagataataaggtggagtatacaacaaagttaaatttacgttcttttcctccatttactataaaacttaaagaaggggtaaaaacccctttactaatagatggatgcataatatgacctaaaaatgaaggagcgtagcgtaaatgacaaagtaggtctatgtcatgccaataacgtaggtgaacatatttaccatgattgtcaagacgctctggtgcaaagaagaacatattcccttgccagtattttagtagtttaaatccattattggataaggtatatgtttcttcaaagatttccatatcaaaaatttctacttgccatttttctataaattgatagtaaagtaatccttgaagtgcattattaattttcttccgtgaaaatttattcttgaatagatataataaatgattaaaccgaacagatgtatgaacaccaatgaaattgagtatagcatattgttcctctgttaaaagctgcttaaacttaactaattcgtcataagagtggaatacataggttttatccaagtcatgtatccgatatatttgaagtccttgtacatcctcacttgataaatgaggaatagaaggaatataagtagacatttgtttctttattgtacgcataatcatctattaaaattggtaaattgacgaattagattttttactttggccttgcggataatttagaatacgtacagttcctcttctatttttagcatcaatattaagcagctcacatgtaacaattgtttggtttattgcgtcatccacggttggatttgccagattacgaccctttaaccctttaaattgaatacctggtgcaacttctacgaaaatcccagcaatagcatctacacctacaattttacctacaaagcggtcacgtcgtttgtttaattctaatagtttttccattggatccgtttcaagtttctttttatttcctctaaactcatagcgcccatccttttccactactttatcgatgataagctctacaacatcgccaataataatatccgccgaacgaacgaatgaatgagaccattgcgagtatcttactcctactgttacaccatgaacttcaaccagaatagtttgtgcagatggaatatgtccagaaactgttcctgtgtatactttattcccctcttgctctactatttcttcatataattttctttgcagtgcaagttctcctgcagtgatagatacaacagcaaagttcccttcctcagttctttggaaatgctcaataataacgggttttgttttacctatcagccattgaggatttttaggaatatttatacctgcctctgtaagtggacaatatgctgtcgtatgagtaccaatttgcattgtgagcacttgtatccgctcagatgtcccgtttttagttgggaataatttttcagatactattgtaattaagcctttccctacagtacgttcacgtttcatacgagctaattcttctaattcatgttcacgtattctttcaaattgattgaaagttgattctataaagatgtcctctagcgtgttatccggttcaaatgccatccctagttcttttgtaatatgagtatttaccttatcttcaaccattatattttcctccttgaacgtaaaaaaggacacacctgtaccgttggaatggtacgtaaggtgtgtccttcacgtaagtcatgttttatttgtataattattaattaaaatataacgtttttatgtaatttgtgcaagtattattttttgaaaagggaaaagttaaaatactatatctaacctttcctcctaatttaagttagattttccctaaaaatataatcttgaataaaaagttattttaggtttctataggtattaatcaaaaaaatcatctaattccttactcattacattagatgtatttttcttttgttgctggtttttattaagtagtgaatttgtattgttatacgtattcttttgtttggcttttaagttttttttgcgttctttatagtcgatatgtttatcttcatgctgctcttcattatttctagtgttctctaccatattcttttctaagttttgatgaacagtaatgctaatagattcgtaaacttttgcaacctcttcatcaagtttattttctttagtgggattaactgtttttgtagctggtttcaaattagttttcatatctgtttttgtttcctctaatactgtggttataagtccctctgttagaagctttttttgcaatggatcagtttctacaggaattcctaaatgaattgggtaatctatatccctttttggttccagcatagtattagatacctctttcttccgttctgctagctccatattttttttaggacctactatttccctatgtgtctcttttgttatattcggcagctcgccattccgttgtagggcatcttgtaatcttgaagcacgtgtataatcaattttaaatgcgttctgtagtgcatgtatagaagaattccctgatgccttaacaaaggctactacatcatcatataggatgtctttaaagaagcctgtttcctcttgctttgcttctgatttttcgtttggaatgctattttctcgtgaagtcgtattatctaaatctgtattagatgaaggagtagtattgatttgagaatcctttgataatatcaacgtattattattgtttgaaattaaaactttacgagggctattcccggtgtaagtgctcacaatgtgattgtgttctaacttctcaataaattttacagcctttatatggctgattctgaattttctttgcaaaagagatggtgagatttgttgtgattcaataacgaatgccttaatttcttcatacaacttattttcagtttcttcaataacatttccctgttgactgacatccttaaaataatcaggaaaagttacattttctacagtgtttgtttctatggaattattttgttctattttatcaccatgcataggtggaaatgattctatctgttttttattatttgcatctacatgtttcataggatttgattttgcgatagattcttcaatgagtcgaagacgttcagtttcccaatattgtccagacttgatctctacttgaatgattgcttgagtaaattcctctttgggtacaaagttactagtaatttgttgtacaggttgcacatgattgtcttgtacaatacgcgcagcacaaatgaaggcaccttgtgccataatatctcctggtgacataacgacttcttttaatttttgatatgtcgaacctaagcgactaacgggattctcttgcataggagaaatcccttgttcggattcggattctttaaattcctctgtttcaccaaacatgtcagagaaaattttcgcatcatatggtgttacatcaccaaatatcatcttgttacggaacgaacctagtaaagtaaacatatactgctctgtgaaatccaaagctaattgagatagtgtttgacttgcaattgtcagaatgactttatatttacgagattgtgcagggaactctttgaacgggcgaacaaatgtgtagcatcctagcccgagagggctggggtagctactaacccttacgggtcgcgataggtaaagctttgaagttatctctactttttcccccgccccacaccgtgcgtgcgactttcaccgcacacggcgttccatcggttcagattgataacccctaataaatttagttggtatcatccttattctttacctcgcgattaagataaggtgaacaatgagatatatttcaaatgtgtagcagctcacggtatttctttagtttcggtagtttgtataagatactgtcttctaagtccttttgatgtataagcttatggcatcttatgcacagggtggcaagattgctgagtttgttgattttctctaaaggtagtcgattattaacatgatggcaatgtatgttagttggaatcaaccctgtcttacatattcggcactttcctttgtcacgattatatgcataatcgcgattaagtatatattcaaagttatagagtcgtttatttttagtttgtctaagcatctgatacaagaccatttggttgatttggtcgttcgaataaatggttggtctcattttcttatattctttcacgaaataccctgacttttgacctgctataacaggtctttttttgcatctcgtacgcaacatgtgttatgatgacatcacatgtgtttctattagatcaccagccccaactggtggtttctctttatcattcttttccccaagaaaaaggatttttgtttgattggcttataagctggattcatctttaaaaatgcccgtgtctttcttgtttgaacagtagattttttcatctctaattttctagctatttcttctgtggtatacccttcaccgacgtgcagaataattgacttttcttgttcttcaagtacactcgtcacttcttcaaattcaatggataatatcgcttctttttccacatcaataggagatactgcataaaattcttttactgtttcctcatctcgatgcaaatcaatcgaatgaatattcattttattccgttcctcatgaccaactcgtctgcttatcttaaaaggagtccctttcaagtgaagctcatcactcattgcccatttcatgcctttcatcacgtatgcattgaatgtatctactctctctggatcataattcatacaatgctcccataaatacagatggccaacttgtattaaatcatccaaatccatattgtttatttctgcaatctgcccagctcttgcgatacttccaaattgttgcttgatcgctgcaatcactaaatatttcttttcttcaaataattcttctgctgtcatttttttaccatcccttcttgtttttaaatataatagtttgctatacaatgtaccctctccacggctgaagcattgatgcctctacttcttaaatgttccacaatccctaaaatgcttttacgatcctgttcaagttggttatcatatttttctttctcacggtatagcgctataagctcccgtcgagccaatcgtgcttctttaatccaaatgcaaagtaacaatggatcattcttttgaatcgcctctatttgtttcttttcacaatgctgcaagaattcatctagtatttgttttttctgtacatctttctttaaaactgataacgtcatagcgctttctcctctcaaattcattccacatcttttgtaaattctttaattggtttatcgagtgcataaacaacaagcaaaagcccacagatcagaaacccagtgatacatactgaaaaaacactttcttccatcatagttatttcctccttccaactttttcacatctcagagaacttaatttgagagtttactatattaattttctcactcagcacaataggtaacgtatactctccaacaatctttgttgcgagtgccaaatgaccacgtttaattgctttatggcttgttactccaaattcacgatataactgattatagatatcacggtagaccttacctctaatccccgcatgttggtacgcattagactgtttaccacctaatagcgcaacgccatgacgcttgactgcatttgatatttcatcgcattctacagcaaataacggcgcattttctcgtaagtctttgacatctgatttgatgtgctggagttcttgcttttgcccttctagcgcttcaaaagtaagctttaaaatactcatgggatctgtaggtacatgttgctgttttttgatgtattccttcatacgtttaaattcttgtataaatcgaatttttgtttgcactgcttctttcgtgttgtacccaaaaacaactaatgtaaatgcttcttctgttaaattgtacttgggatatattcgaccacgttcatttgtgtaagttgactcctcaaaatttaggagtgagaattctgctcctgcataatccatttgaagtttaatatctgatataacattatcgtgtcgtttaccgaaaatctcagcaattgtcaaactatccgttactacctcaccattactttcaaataccagttcgtttgctactgttaatccatccatgtaaagccctcctaaattttaataatgcttgtccagtccaccaccctatgcacttggaatgattcgtattgagttcgtatgacgatgtactaaatgtaattcatcatctactttcttaaagattagccaattatcaggatttaaattatatgaattgatatgtatcttttctctcttggttggtcttttaccatttttcataaatgctcctcccaccttttctgtttatttttcaaacagctcgtccactgttgttttgaagtattttgctagtttctgagcttcttttagggtgaaatcacttttaccgtgttccttagcaaaatatgttctcggtgaaatatggattaaatttgcaattgtttcttgcgtcatacgttgctcttttcgagcaataaataagtttttgtgcatggatatcattccttttctaattaaattagttttcaatcataatccaacataaagttaacactgttaacatgtcagttaaaaaaaatcgatgaataaatcatccattggaattttaaaaacttccgacatccctaataattttgaggttgttggctggatttttccgttttccattaaattaactaaagaatgactacagtttaataattgagccaattccctctgtgaaaaccccttattttttcttaataaagacagtttcttcccattaaattttttcattttcgccctccatctgttacctgtgttaacatcatacactaaatatattttctttgtaaaccctttttatcttttttttaatatcttgttctttaaaaaacattgctttgttatacttttttagttatcataatcaatagaaaagtttaattcagttaaccggagggtgttagtaatggtaacgttaggagagcgtataaagtctattcgtacgaaaaagaacatatcacaaaaagaactagcggaagctttaaatgtaaataggtctgcgatttccttatacgaaaccaatagaaagagcccttcacgagagaacacttataaaatagctactgtcttaggcgtctctatcgactatttattgggtatgcaaaccgacctttcacttgaaacagaaaaaataaattcggaaactgctcatctcatgaaacgtctagacaatatgccgcaagaaacaaaacaaaacattataaaattaattgatgatttaattaaaatacacgaaaaaagccatgattaattattattaatcatggctttaattttactaactgcaagtatgtattcttcatcctcactaaaaatttgttctaacattaacatctttttaattttatcttcagtgttttcctgtttaatttttttaacatttatcttgttcatttgtctaatctctcctataagtaataatctcatcacccattgtaaattagcaccttttttataattttattactaatttttatagatgtctcaagactagccaaaaaacaaaatgcttttttttagcaaaatatattgacaaataaaaaaggcccactttttcaacttcactaagtgggtccatataattcaaccgcctggtctaacatccatataattagtgtatttatccaaaacctttccttctaatcccttattagggacaaatggcatcatcattaaagttaacatcactgaaaatatcaatattctcttcttcaacttcattccctcccacttcttgtttataatccatcatccacttaattatagcagaatcttcccctctcttatataattctcttgcgcttagactggaaaaaaagtaattgccttgagtaaagaattgctgaagacatttatgtaagctttcattagacatatcttgcattgccttaaataacacaataaagtcttccttttctttttgataaaaaacttgagcatatttgtcgacgtcagccaatacactagccgtcccgtctgtttccgcagcataatacatttctaccattttcatattataaaacgcctcattctcgtagccctgatcaccaatccgtttagataaattatatgattcttttaccattgataaacatttctgtttattttcaagtaaataagacatgccaattatatatgatgcatctgaaatagctttgataccaacgtttgcatttttaataatagaagcatattttcttgccatatctctattatttgatcgtagatgtacaggtgctaagacttcgtataccttataaaaatagcaatgctggagaaaatccttacgtccaccacttaactgtttgagtctctgctctatttctttgccaatcccaatcatcattggaaactctttagaaaaatagtaaccatagcatttcataatgctaattaatattcgcaaacaacaatctgtaggttgtcgtaagttatttatttcttcaatcagtgattccccatcaatctgccttagcatgtattgatacagtatttcgtaaacatccacaaactcctgaatacttcctttatcttttcgatattttcctatcaaacgttttaacaattcaatatccctagtaatcgaagcgtactcaaagctttgtttgattagttctgttgtatcaactttcaagcagaaatcacgcattatagttttgtagttttcatccggcaacgttaatacttgcgacaatttcaagagactacaaaaactaattgtcccactttttttgaacttagacatatattgaggacttactccaatagcctcagcaacactcccatatgttagctcagggctattgtcaattaattcacaaatttcaaggtgtagcggcttcaaagtattcttccctccatccggtaacataaaaagcctccttaattttctcaactcagaacacattttaaaattactaggtgtgtgttacactgacgaagaactcgtatgatgcaaatgtttgtcctaagttagctaggatgaacagtgtgaaaggctttgttagttgtacctcttacacacgctctgcgagtttttatgcttttatttattttgttttttacgattattctgtctattaattctacagaaacctatttactgtacacagagctaattttagcatgggctcatattctattccacactaaaatttatttctcaatataacttctgagaaaaatgttgaaaatatttgaatgcagtttcatatgttttatattcgtaatgagcattggttcatttttcaatatattctgctaaaatccatgtagaaaccagccattttttaataattgcaccccaccaatttgaaaatatattacaatataacacgaagtaaatgcttgaatttctcaatatgcgtcaagacattattatggtactatgattttatccttacttgtatcatcctgattggtttccctaccaatcttctccactattattagtggggagtttttaagttatatgttattaaaattaaagtggttcaagtcaaagtaagacgctcaatttattttgagcgtcttttcttttggtaacaaacaagttataatctactcaataaattgaattatcgatctttatttatacaggagggattcttatggtgatttacaaagataaagaacgaggaacatatttcttcgtcgtcagagtccgtcagtttgatggcactcaaaaacaagtgaaacgtcgtgggtttaaaacaaaaaaggaagctcgtgaagctgaagctaaaatgttagttgaaaaagaaacaaattcaaacttaacatttgctcaagttgcagatagttattttgattggtattgccaaagacgaaagcacacatcaataaacgttataagaaatataatatacaatcatttaatacaagaatttaacaaaatcaaaattgaccagattacggccaaacacattatgcattatcaaaataaaattattaacaactattccgcagaccatttaaaaaaaattcatactgtactctcttccatattcaacttcgcaattaaatttcatggattaacaaacaatcctgcacgcattgctggaaatttcgaaaaggaatcgaataaacgaatgaatttttgggagtttgatgaatttcatcaatttattgatagtgtagacgatttattatataaaacttttttctcgacactttattatagcggtgctagaaaaggggagctactagctttaacttgggaagatatcaattttgaagaaaaaacaataaatataaataaaacagagtttaacagaaaaattacaaaaccaaaaacaaaatcctcaaatagaattattatgttaccatctcttgtaatcgatttattgaaaaatttaaaagagcatgctacagtaaaatcacctatcaaaattaattacgttgtgtttggcgaattttatactagcatatcagcaagcactctcgatagaaagtatacaaactatgtacttaacgctggtgttaaaagaatcttgttacatgaatttaggcattcccatgcatcatatctaattaacaagggtgtaagtccacttatagtagcacaacgtcttggtcattcagatgtggctacaaccctaaatacgtatagccacctatacccttcaaaacaagcagaagtaattgcatttatagaagaagatttagtaaaaaaggtaccaaaatgttgccacagggtttaaaaaccctgttataatcacattaagaaacactgtgaccatgtaattcagcaaaatttgaaatatcatgaacgatttcgcttgaaagtactgatttatgtataacttctttcccacattttatatgtgcaccatttgctgaaataaacgtatttatacctagttccttaaattgtgagcataaactatacggtcttccagttgtaacaactacgtgaattcctttatctattaaccttcgtatcgcttcttttgtactttcgtgcatgcttctatcaatctcacttaataacgtaccgtcaacatcgaaaaatacaactttgtacataagtctttacatcccgtccaaatgattcgtatcattaatgaaatgcaccgttttttgttcaccctcaatttcaattaaacttattcccgtatctcccattttgaaatagtagtccattgaaattggcattttgaaaaatgcacgtaatagactattaattacgcctccatgggcaacaattgcaattcgatcatatgtattctctatcataattttagaaaagattccttctattctcattcgaaactcaataaatgattctccgttttcaaaacggtcatgaagaaactttggctctggatatttctttgcttcttcaaatgatacgcctgcttgcactccattattaaactccattaattcctcttctaattgaattggacaaccaattgcttctgctaatatttcacccgtttcacgagcgcgttttaatgtgcttgcccaaatgaaatctggcgcaaaatcttttttcactttctgtacaagtctttgtacttgttgtctccctttgtcagttaactcaaaatcagctcgaccttcatgcacatgtaaaatatcagcttctgattctccgtggcgtattagtagtatttgcatgtttctctctccctttatttaacattcataaaattccattatatcacattttaagattccaaaataaaaaaggaacggtctcccgtccctcatccattcactttttccgcatcattccaataatatttactaaacgcttctgttaacacatcaattgtgttatataattcatctaacgtattatcaacaccaccaacttcaattaacatcgcatttttcgataaatcttgattataaacgccatttccatcttttttatacttgggaaaaatccctctacttaatccgtagtagttttcatctaaataactattgatcgctcttgcaattttttcattttcagcacggccttcattttccatcccaattataaaatataatcttgcatacgattttccgttaattacttttgttgttactttcttacgctgatcgtcacggtgtatatcaattggaaacgcaattttattattttgtgctaatgcttcttttacatattcatgagacgctttatatgattgcggccatttccattttttactcgctaataaatcacccatattcgttttatcgtgaactaccggaattccttgtccttcaagttgctctttcatacgtttccctagtaaggacacatttacatctggacttgatggatccgtagcccctggtaataatggaaagaaggattcccagctatgtgtatgataaatatatactgcactttcaccttttttcgctccgttctttttctgaaccggattattcttttccgcttctgtaactttatcttttgctacttcccgttctttcgttacttcttcaatcggtacactagattcatttgggatattcgtcaagtttgtcccttccccagctacgataatattagaataatactttgacataccaggtacttctttaccgacgaatgttcttaaatctttaattttcaaatctgtcgcaatagagaacattaaatttccaactgactctcttttattcttcttaaaataatcaaatccgtaatagcgattctcactttctatcatttgaacaaaaccttgcatcgatacttttccaaaccattgatttgcataattcgatttcattgtatgtaaaaatgacgtcaaaatcgacgctatcataattactattagcgcatataaaaggagtaacgaaatcagtttcttcccatgtattcgagttgcatactttttcactgcatcaccttctttatacatggatatgtacaagcttttcggaatatacgcaaaaaaaagagaaatggtatcccatttctcttcctcacttttattgttcttttcctgtatcatttgaaggtagtttcttcacttgtttttctttaaatatttctccaattgccccaagagtaccaagtgtttcaattgcattagacggaataaagactttatttgctggtccttttgcaacttcagctaatgattcaaatgatttgtaagcaagtatacgctcatccaaattcgcttcacgaagcaattcaatacgattttgttctgcttttgcgatttcttcaattgcccttgcttccccttgcgcttctaattcttttgcttcttttataccttcagcttcgcgaatacgcgcttctttatccccttcagccatcaagattttactttgcttttccccttcagcacgaaggactttatcttgttttgctgcttcagcttctaaaataatcgcacgtttattacgctcagccttcatttgtttttccattgatgcttgcacatcttttggcgggttaatatcaacaacttcgacacgttcaatacgtacgccccatttttctgttgcttcatcaagcgctaagcggatttctgttgaaattttttcacgaccagataacgtttcatccagttccattttaccgataatttgacgcatcgttgctgaagtaatattacgaacaccatattcatagtttgaaataccatatgtcgcaagttctggttcaacaatttgatagaaaataatagtatcaatttctacttgaacattatctttcgtaattaccttttgcggtggtacattcgtttgttgaatacgtaagtcatgatatacacgaacacgatctacaattggtattaaaatatttaaccctgggtgcatgatacgttgaaacttaccaaatctttcaacaaccccaactttttgctgaggaataattttaattgttaatgcgataaatgtaactacaattagtgcgaatataatcgttaacgttaatgctaccatatttattcactctcctttttcacttgtaatatagtactatgcctctttataacaacgactttttctccagcatcaattgaagaatctgcaatagctgtccaagtatctccatccactttcacaataccattcgcttcatttgtaatcgtttgcataacaatcccttttttaccaacaagcatatctactgtatcagtaaaaccttttgcttctcgaaagttttttgaaattcttttcgtaaagaatgtcaaagttaaactaacaattgcaccaacagtaacttgtaacagtagtgcatcaggagcaaacaaagcaataagacctccgacaacagctccaattccaagccaaagcatgtaaaatgtaatcgacaacatttctgcgataaataaaataccagctattataaaccaaattacccaagcagccatatgcaaccctcactttctttctcattttctatatgtatatgaagaaaagaatggtttatccgccctttcttacacttgggcgtttgctacaagctattgtacatactcactgttacaatgatcattaatataatactatatcaatatatccttcattatacatgaaaatccctttcaaaaagtgacaaaaaattaaattctttaaaaattttaatttttaaattacaattattctaattactaaatactattttttatagaggtgataatcttattgagaaacctgtcactaatctactatttaggttccaaaatatgcattactctcgctgacatcgtatatgtaatgattattacaactcatatttatatagcaactaaatcagctactattactgctctttttccattattacaagttatcacaaatctaattgctaacatctctgcaccacttataataaatcgttttccatcttatacgctgttatatacgctccaatggctgaaaacagtctttttactattattaatgattttgttcccggtcttatccacaaacattatagctctattaacttttatttttgtcatttcattatgtagtgggtggagtgctccgttattatacggtattctcccgcgccttacaccgaaagaaaaattagtaaaagtaaatagtatcttttccttttcaacacaaattgtgcaagccgttgcttattcatttacgagtattgtcgttcttctcattggcgctacttctacactcatgattaataacattttaatgattttcggatgcattgccttacatttttcattacgttccatacatactgaaagaatagcagattctccctcttccaaaagtactgttttattggaaggttggaaactcctatttcaaaatccttctctccgtaccgttacatatatggacttaatcgaaactttcgcagggacaatatggattggtgctattacgatggcatacgttacgactatccttcataaaggcgaagaatggtggggatatattaatacaagttattatgttggcacgttaatcggtggtctattagcatggaaaatgagttcctatattcaaaacaatttaatacgatctatgtcgattggctctcttatatttagcattcttacatttttatatggtatgacgagcagcggatttattgcgctttttctatgtgttctaatgggaccatgttatcaaattagagatatttcccaaacgactgttttacaatcaagtgtcgcccctgctttattatccaaaatgtatacagcacatggtgcacttctttcaacagcctctggactatctatgcttagcattggcattattactgatatgttcggtgttcgtacaatttatatcatcgcttctattcttattttatgttccgcttgtttatcttttagtttattaaaatatcataagacagagcagaacgatatttcaatttaatcactaaaacaaagaggacagggattcctgtcctctttgtttattctattcatgataagttgaggatttttctatgctttgtcgcttgttcaaaagcataagctaatttaattaatatcccttcactaaaggcagtgcttgcaatggtaattccaaaaggcctcccgctttccatataccctgctggtattgctatagacggataacccgcttttgcacatatagtagaacctatataggaaggaaacagtatcgcatcaagattatatttttccaatgcaaaatcaatgccttgttcttgagaaaaatatatatcttctaatctcgcatttaaatattctggatttcgtaaagtattaggaaaatcttttcttccctctaacttagtttgtccatattttaaagctctttctgctatgtttttattaaactccattaactccgaaatagaatgtaccgggatagtagaaggtaatttagaaagatagttatctaaactatgcttcagctcataaagcggaactccccagctccattctctatgaaaagaaggaatatcaatattttctactactgtcgctccttcattacgtaatacttgaatcgtttccttaaacaagatttcatcatactcaccattttcgtaataatcttttggtgcatcgttaaacacaccaatcttcgctccatttaaaccatttgcatcaaggtaagatgtataatcccgatatgccctattttcactttttcgagtaactacatctttctcatccactccagttaaactccctagcaaaatagcagcatctgttaccgttctagcaaatggtccagctgtatcttgtgaataagtaaatggaataattcctctacgactaattaaaccgacagtcggtttaatacctactacagaattttgaacagcggggctcaaaatagaagcatcggtttctgtcccaacagatactactgtaaagttagcagcaactgctatcgcagatcctgtactagatccgccaacaaacatatgatccttgcccgttccgtatggattgattgtttgaccaccttttgcactatatccagcccacatttcaaaagacattgcatttgctaattctgtcatattcgtttttccaattatcactgcccctgcttctcgcagttgagtaacgagaaatgcatcttcactgcttatattttgttctagagctattgtacctgcacttgtatgcatggagtcattcgtttcaatattatccttaagcaaaacaggtattccatgtaatggaccccttataccttttgtctttctttcataatctaacgcttctgcaataaaaattgcatctggattgatttctaaaattgaattgattttcggtccgtcttgatcatactttgcgattctataaagataatacatcactagctcttttgaagttaactttcctgattccatttcattttgaatatcttgaattgttaattccttttttaagattggattaaactgaatttccatttatattctcccttatatgaacttttttagcgtataccccttactttttcatttttttcacctcaacacatcctaaattaatattcctttaaagaaattcaatttccttatttaaacacctttaatttaccgaaaaataaaaatagtctgaaacggattaaccttcgcttcagactcttacattactgtgcgtatacttcatctaacaaatgtaaaaactcaccttgtttcccagctaattcagggcattttgcaatatcaacccattcgtagcaaaatactaatcctttatcttcctcaccagcacttacaatatgttcccaagtatcctttacatctgttagtaaagttacatgaaaaaagtggcatttttcatattcctgtttttctttcatatgtatgatgtaatctgctaaaaaacgttctatgcataaatgacgcaatccggattcttcctgtacttcacgcaatatagccgcttctaacgtttcaccttcattaaccgttcctcctggcacttgaataccagcttcatgtatatcacgatgtttaaaaacaagtaattgcataaccccctctttttctcttgtaatatatgcatgtacttttttcttatataacatcgtcattatacgtctctcccctcaatcatttactctgttacttcttcaagcgtcagttgattatcatacaaatatgtagcttgtggatttcccacataccttacgtgccatggttcataccgataacccgtaatcgtttctttcgcttttgtgtatcgaacaacaaaaccaaatttatgggcattttcagaaagccactgaccttctttcgtttccccaaaaaccgtctctaactgaaatttagcagattgagacgtaatatccatagctagtccagtttgatgctcacttgtgccaggaaccgcgctagacattgctgtttttgcttccccgtcttgttttttatacatcgtatttaatgctttttgtcgatcaaaagatctaaatccagaaactgcaaaaagaaaaatacgctcgttgtcagcctgctgaaacatatcctcaagcgccctcgctgcctcttttctcatctttttcttttcttgatcaccttcactagagtagcgcactttcggaataactaaatctggcggtctatacccatctggtaaacgcctacttttatttacaagtacaagcattgaattcggattattaattaccgcaatatccccatccatattagcaatcgtttctttcgctttcggaaatatgctatttacacttacttcccgcgcctgcttatccttatacattttataattgattcctgctactccaataataattattgcagctacaataccaagtagtgcccatctttttttcatataacgacctcttattttaataatttggccatttcatactcatcgatgccctttccatcgataataagagcagcttttttgacaccttctttctcaaatccagcttttttatatagtgcctgagctcttgtattgtgggccattactgttaattctaaacgccatacatcatgtaattttgcccacttctcaacctctttaaacaatctagtcccaatacctcgcccgttatactcttgcaaaataccaattacaatgcttgccacatgcctctttctttgaatgttatttccattcactaatataaaacctactatcctctcatcttcaactgctacaaatattgttgcatattcattttccataaatcgatggatcattttttcttgttgctcagctgtagttttcctttctcctggttcatatagcataaacttcgtttcttcatctaattgcttacttaattgcaaaaatgatgctgcatcttctatttcgatttccctaatcacttcaatcaccctaccagtttcataataaaaagttttccttataaaaagattttctctactttcccgaaaattcctttgtaaatctcctactataaattgacaaatttcgatattactataacaacgacaaattatgtctattctgtgacgtctcaccattacaaagaaaaaacgcaagcattacacttacgttttttcaagattgaagtgagctaataattatcgatagatgtcctggctaattcacgtttcactttatccattcactttttctgcctgccaaaaatattcaccaaatgctttagcaagtgcatcaattgatcgattcaattcttccactgtattatctacaccgccaacttctattaatatcgcttgtcctgataagtcttgattatagattccatttcctgtctggaaccctttttgaatgaccccacgactcactcctggatatttcttattaatcgcctcatgtaaagctgtcgctaattgtaagtttttttcatagtttttatttcctttccctactacaaatgcaagctttgcatatgatttatctccaattgtttttgtcgttacattctttcgggcactatcacgatgcaaatcaaaaaagtattgaagatctttatttccagccatagcttgctgcacaatttctcgtgacatcttatacgaactattactgtttaaacctttacttattaacttttgaccaacatcactcttatcgttagtagctccaatcccttctccttctagttgttcacggaaacgatctcctaatatagaaatattcgatacagaactcgttgctttattcggatccgggtcattcgttaagttaagtaaaggtaaataagattcccagctatgtgtatgataaataaacgcaacttgtctcttcccggtcgtttgggacggctgttttttctctttactcgtatcttgtttaggtgcttgtccagttccactagtccgttccttcactacttcttcaagaggaacactcgactctatcggtaagttagaataatttgtaccctcacccgcaataacaatttctgtatcgtacttaccaaaccccgggagctctttcccgacgaaactgcgtacatcattaaagcgaatatttgtagccatagaaaagagaaaagaagaaattgaaaaatcttgattcaaatttcgatactcctgtgtaaaataatgattctcttttccaagtacatacatgtaaccattcatcgataactcatttaaccaattatataaatacgttgactttgtctctttcatagaggttaccatcagactaataagaaaaaaagtcgctagcattgtagtaataacaaataaaactaacttacgcatatttgtaaacttcataaaaaaaaagccccgattcatactatcacctctctattttaagttatgtacaagccctagagaatagaccgttaaaattccggctatattgttaatgaggtgaaatgaattgaagctattaataggaatattaccaatcgctctatcattcattttttatttgtccgctaagcaaccaaaaatctctattgtgctacatatttctgcgtacttggcactgtatgtactcggtacaattatttccattaatatatacgatgttttaatacaagatttagttttcatgacgagcattcatggaattttactgaatccatttttccttattgcaggagcgtatataggaacatacactttgtacctacttttgtctcacattattatgaaaataaaaaatggagcgtaatgaaatgcaaccaccatttatctgtcatacatgcaaaaaaagaattgtgagaaagaaagaccttattacagccacatggtacttccgcttttatttatttcacagtgattgttttaaacgacagcaagtgtttatctcacgatttctccctgtgaatacacttttcaatttctttcttattatatatggaattatttttggcagtattcttatgattacagaaccatctattatttggctgactttcttttttcccattttttatcggtttctttcttattattatgttgaacgttttttctctacataacgcgcagactgacctctcggaatacttaaacattcccactcattttcttttaacatcttcccaatgtaaataatctgaccaatatgcaatgcataatgagcaatttgcctttcaattgcttgcatgacagtatgtgcttcaccgcgaatgtataccgtcttcaataagtgttccggcgttaaagtattcatcgtattaaaaacatatttccatccttcttgccaagctataagggtttcttcttttgagtgatagcatccttcaaattcaccatctcgattacgatctgttttttcaccatcagacgttaaaaaatccgtccatctagaacgcatattaccgtgcagatgcttaataataatcgctatactatttgtttcttcatgagaagaccattgtatttgttcatatgataattgagaaagtgcccgttccccttgtttctttgttgctttaaagttcgaaatcgcacattgtaaatattctcgtccgatatccatattagcccctaccttcaccctagctaatttttgttccatttggcaatttcatattaggctgaagtaacacaacatcatcagcttcaggaacaccaccaagcacaagtacttctgatttgaatccagctacacgctttggtggaaagtttacaacagcaacgatttgttgaccgattaaatcttctggactataccttttcgtaatttgagcacttgactgctttatcccgatttctccaaaatctattgctagtttaatcgctggtactctcgcttctttaaattcctctgcatgtattacagttccaattctcaaatccaaatttaaaaaatcttcaaaattagccatttatcattccccccaattattacttagacaaaatacaaaaatccccttcaaaaaaagaaaggtgcctaagcacctttcttttgtaattcacttgattcatttgatttatagaagaagaaaccgagaatcccgccaatacatgatggaattaaccatccgattccttcgttatataacggtaacatttgtagtacattagaaatcgcgtcaattttaattttcgcactttctaaaccgttaaagaaactaattaacaatgcacctaaaatagctccaatataaattgtattacgcttcccaatccacttatggaaataagaaagtacgattaatacaattgcaactggataaatgatcattaacacaggtaatgttactgcgattaattgcgttaaacctaggttagatacaattaaactaaatacacataccattgttacaatcgttttatgcgaaagttttgggaataagtttgtaaagaaacccgcacacgcagatgttagcccaacagaagttgttaaacaagcgagtataataacaagccctaataaaattttaccactcgtcccatatagctcatttacaacattcgttaaaataagaccaccgttttctgagataccaagtgatgtacttgttgaaccaagataagcaagtgataaataaattaacgttaaaccaagtacagcaataatacctgatactactgttatttttgcaatttgactactctcttttatccctttagagcggataacttgtacaacgacaattccgaatacgagcgcgctaattgcatccatcgttaaatatccttgaataaatccaccaaagaaagcattttctttgtaagcagctaacggcgcagctggctctccaattggatcaataattgcctttccgacaataacagcgacaattaatactaataatggtgtaagaaactttccgaaccaatccactaatttagatggatttaatgataaataccacgttattccgaagaaaactatcgtgaaaagaaatagcatgtaccactctgaaaccattgcctctgataaaaacggcttcatacccatttcaaacgaaacagctccagtacgaggaatcgcgaaaaatggtccaattgctaaataactaatcaatgggaaaataaacgcaaatatagggtggactctagaagatagcgctttcaagtccccctctacaaacgcgacagctgttacagctagtaggggtaatccgactcccgttacaaggaatcctattgtagcaatccaaacattctctcctgcttgttgacctaaaactggcggaaaaattaaatttcctgctcctaaaaataatgcaaatagcattaaaccaattgctaccgtatcacctggccttaaacgtcccttcatgctcttcatttgcatagcactttttcattgtttatctctatattttacaatatgctatgcatcctcctctctgctcaagatgataaaatatgccccttacaaagcagtgtctttctccataatttctccattccccttatttttactctaatcattaatacaattattattttaaattttgatttttttgaattttcaaatcattagagtattattatgtggagtgtagatgtcagacctctttgtttttatcacacatatagtaacatatttagttgcaaaataaaaacatattttcaaattgatttttttgaaaatcgaaattatctacattttttattctcttacacaaatattgttataatctcacctattattcgatcgttattttcaaataactttatacacgtaacatacaaaagccatctaatatgaagtgcaccccaattgttagacacagtctaacaattggaggtgcattttttatggctaaattttcttcaaaagaacattttagcaaagaaaatgattgattttgtacatgcttaaacaagcgaaaatgtacatgtttatcttgacatttacaaagagatgaatatatttgaattttattaattaaatccagaaaaaaatatcagaatagaaaatgctttaaggcctatttgcagttgaatatttatggtatgaatattgccgtatttcttagtatgctaaaaatacaagcctgtaaatcactttgttatgactgtaaagtaaaagaaggatattgaactattttattatttataaggtattatatatactttgagattcagaaggtttgaataagttacgctttatatgccgatattttggttcaactagagtatcaaatgtggaatatttctttgctatataaaacctttacttcttaatcttatataagcacaaagtaaaacataaggggatttttgaaaaaagagtattatggtctagtataaaacttgtattttagaactttaaatatattaagataattcaaaggggaaaataaaatccaataatcattaagatggtagtttctttggattcgtttcttaaaatatctatttttgattttccttatctattttgtaataaaacttttcattaatagatgaaaatatgtatgctttattaggaaataattaaggtatcttttaattatctataattatttgttatagaggaattagataattgaagttcttttcatttgggaatacggtgataaaaaaggagggacggagttataaggatcaataagaatacataattaaattgttttacaataaaacattccattctcattaatattcttataatcacaaaaaccaaatgctataaaatggattgtttgaaaaagttgtgaatatgcatatttttggatgcgtgtacaattataatcatcatgatatcacttctcttttaagaatgcgaagttttgtcgttatgtaaacatgggtgctcaaaactttacattttttgtacaatataaaatattaaaatacagttgtacagataattgatatttctttatatgaaaaaatgcttataaatactatgcaaagctaacgtataattttttagaccttatagaatcaaataagaataaagatagaaaataaaattgaaatactaaggctagcaaagtaacgtgaggtaatagcatctattctgagttttgtagttaaatgttacctagtgataagtaattcagtattaagggaggagaaatgtaatggataaatttattacagacttaatacaagataaatcaatagtacgacaacttcaaattttagaaaccttgattgatagcaatgaaataaagtcttccaaggatttatcacaaagtttaaagtgtacaagtagaacaataataaatgacatttctcagttaaaactagcgcttcccgaaaattgggatttaataagtgttcaatccaaagggtacctattaaaacgtgatttttcaaacgatttctccgaattaattattccctatttaatgaatagtgaactttatacaatattaatcggtatatttaatcaaaaatattattctttagaaaaatggtcccagttgttatatctagataaaattacactaaaaaaaatgctgaaaaactttcggaagatacttgtgaactttggattggattttaattttagaacgattaaattgattggccaagaaataaacttaagatatttttatataatgttcttttataatatccaaaagtataaagaagtaatcaatttagattctagattacaagaaaaaattaaaagcattactagaattcacaatgtagaaatagattataatatgctagcagttattattagtgtatctataaagagaattgcaaataaacattatatgtcagaagttttagagtttcttcctatacttgatacaaataatttaaattgcataagttcaattatatgcgaattggaaattttcttcaatataaaattcacagaatatgaattaagttattttaagaatgctttttcaataatattagaatggaacattgaagaaaaaaataggatcacagattattattataaaataaacaaaaagacttatgataaaaacaaacatttattccaaacaatatcttctgaaataaatgtttgtttagaaataaaagaaaagataaaacatgacttgtatttcattttacataaaatttacaagtttcaaaagtatggtttatcaataggcgcttttggtaatgaatttgacactgtacatcatgaattttcagaaggacataatagaatttatcctcttatttcttcttggaataaaaaaataaataaaagtagattaactaacgatgagatcaattacataatataccatattttatttattgtccattcaaatcataataaaaaaggattgttattattatctggttcatcagctttaaagaagtttatttattataaactcaatcacgagctaggtgattttgtaacactacaacaaaaaccagattgtatgcataaatttgatgttattctgacaaattatcaaatcccgaataccccaatacctataattcggatctcaaacaaaacaattcaaaaagattcaagttatgttagaaaagttttatccccttttaactaaacttaaggttttagttctaaataatgtatactttccttgtatggaataacttatatgaaatcgatactagaaattgataacatgtatttattttcaattgaagaacagaatacttataagacataattgatttttacgtattgtttgaaagaattctcttaccccaagtgcgtaacgataggtaggagattcttttggtttggcttagccaaacagcgcgtaattgcattttttattttctttattatgtaatcagtcatgcataatgaaaattttgacatgtcaacaaaattggattttaagaacgattaagtgttcttgttatactaccaatagtgtattgacgtgaaatacataaatgataataatttatcaaactatgcagacttatttttcaggttatccgtgaattataacataacactgctagtttagaattatgctgttgttttatattattaattttacatataacgattaatgcttttgaatgcaatttctcgacttaataaattagattttctcaaagtgcaaaaacatccattggtaaacaccttctgcccatcttaactaaatatgaaaaaaattgtgcaaaaagaaattgaaacagttataggattatactttagttttgaatataagaaaattaattaggttaactacgaatttaaatgttacagctattgaaggactaaaaatgaaagatatgttgcaatcaatttatcttagaaaaaatgacactgataacggtaggggaatgtttaccttattttagtttttaaactacacgaacaatgaaaataatgtgtaaaaattcacaaatagattccctctacaaaaacatgtggcagctgcgagaggaatatgtaattttcagaaggattatatttttgtaagtacggtgtaactttcaatagagtctgtaatgtaaatatcaacatcaaagatgaaccaatatttttatcattttagccaagaattctctttcctcaaggagcgtgaaaggatacagtccagtgagtataggtgggagatgaattttcttcgaacaaggggtggcttcctgccttgaaaaaagagcttgtttggctaaaagaagtggatagtattgcgattcagttttctgttcgcaactctgtggatgcttttacacgctttaaatctaagaagaacaacgtacaatcttatacgacaaaacaaaccaatgaaaacattggcgttgtaggaaacaagataaagttgccgaagctaagccttgtttgatttgccaaaagtcgctaagtaaagggacgtattgtaaatgctacagttagacggaatccatttggtagatactttgtgtcattgttagttgaaacagaagttggtgaaagcaaagcgtgttctttctagaggaatgaaaggatcttcccactagaataaacagcgagtaaaggtagatagaattcatgaatatatggaaaattataaaaaacattacctggacaaaagctcaactgaaatcaccaaaaaccactatgttgttggtataaaggttttgcaagtatcgaatattttaaagaatcataagttagcaaaagccattaatgaagtatcatagtcgcaatttcgatccttgttagaatacaaagcaaaatggtatggaaaataagtcattgttgtatcgaaaacatttgattctagccaattatgttctcattgtgaatatcaaaacaaagacgttagaaatctagacctaggtaaatgagactgtccttcttatcttacacgctataatgcggatattaactcaataagccataaggcttctaatcgcaaggactgctggggtagttcaatagctctggtataaatagcagtaaaataacctttggtacaattcgatagttactagacgtaacgattagccgagaaatccccactttagagagcacgttaggaggttaagtgaagggtatttcacaaatgatcgattatatttataggaaaaggatagatcacttcatctatagatgaaattatctatccttttatttgttagataggagatataatttactcatagccccagagaaagtgttaacaggtgatagcatccaattttatagtaagggaggttttactaagttctaataattttctgggtaattagtccttacaacgacttacatttaggaaattgcctgttaataaaatttatatagtaaaggagtgctttaatgtaaaaaaatagggataaatgaatttttgtgaataggaagaccatttgataggtaaatattataattcaaaaagtagaataagcaaaattgagtaacacattaatgatataaactaattttatacaattgaaattgataaaaagttatgagtgtttaataatcagtaattaccaataaagaattaagaatacaagtttacaagaaataagtgttacaaaaaatagctgaaaaggaagatgaacatgaacaagaataatactaaattaagcacaagagccttaccaagttttattgattattttaatggcatttatggatttgccactggtatcaaagacattatgaacatgatttttaaaacggatacaggtggtgatctaaccctagacgaaattttaaagaatcagcagttactaaatgatatttctggtaaattggatggggtgaatggaagcttaaatgatcttatcgcacagggaaacttaaatacagaattatctaaggaaatattaaaaattgcaaatgaacaaaatcaagttttaaatgatgttaataacaaactcgatgcgataaatacgatgcttcgggtatatctacctaaaattacctctatgttgagtgatgtaatgaaacaaaattatgcgctaagtctgcaaatagaatacttaagtaaacaattgcaagagatttctgataagttggatattattaatgtaaatgtacttattaactctacacttactgaaattacacctgcgtatcaaaggattaaatatgtgaacgaaaaatttgaggaattaacttttgctacagaaactagttcaaaagtaaaaaaggatggctctcctgcagatattcttgatgagttaactgagttaactgaactagcgaaaagtgtaacaaaaaatgatgtggatggttttgaattttaccttaatacattccacgatgtaatggtaggaaataatttattcgggcgttcagctttaaaaactgcatcggaattaattactaaagaaaatgtgaaaacaagtggcagtgaggtcggaaatgtttataacttcttaattgtattaacagctctgcaagcaaaagcttttcttactttaacaacatgccgaaaattattaggcttagcagatattgattatacttctattatgaatgaacatttaaataaggaaaaagaggaatttagagtaaacatcctccctacactttctaatactttttctaatcctaattatgcaaaagttaaaggaagtgatgaagatgcaaagatgattgtggaagctaaaccaggacatgcattgattgggtttgaaattagtaatgattcaattacagtattaaaagtatatgaggctaagctaaaacaaaattatcaagtcgataaggattccttatcggaagttatttatggtgatatggataaattattgtgcccagatcaatctgaacaaatctattatacaaataacatagtatttccaaatgaatatgtaattactaaaattgatttcactaaaaaaatgaaaactttaagatatgaggtaacagcgaatttttatgattcttctacaggagaaattgacttaaataagaaaaaagtagaatcaagtgaagcggagtatagaacgttaagtgctaatgatgatggggtgtatatgccgttaggtgtcatcagtgaaacatttttgactccgattaatgggtttggcctccaagctgatgaaaattcaagattaattactttaacatgtaaatcatatttaagagaactactgctagcaacagacttaagcaataaagaaactaaattgatcgtcccgccaagtggttttattagcaatattgtagagaacgggtccatagaagaggacaatttagagccgtggaaagcaaataataagaatgcgtatgtagatcatacaggcggagtgaatggaactaaagctttatatgttcataaggacggaggaatttcacaatttattggagataagttaaaaccgaaaactgagtatgtaatccaatatactgttaaaggaaaaccttctattcatttaaaagatgaaaatactggatatattcattatgaagatacaaataataatttagaagattatcaaactattaataaacgttttactacaggaactgatttaaagggagtgtatttaattttaaaaagtcaaaatggagatgaagcttggggagataactttattattttggaaattagtccttctgaaaagttattaagtccagaattaattaatacaaataattggacgagtacgggatcaactaatattagcggtaatacactcactctttatcagggaggacgagggattctaaaacaaaaccttcaattagatagtttttcaacttatagagtgtatttttctgtgtccggagatgctaatgtaaggattagaaattctagggaagtgttatttgaaaaaagatatatgagcggtgctaaagatgtttctgaaatgttcactacaaaatttgagaaagataacttttatatagagctttctcaagggaataatttatatggtggtcctattgtacatttttacgatgtctctattaagtaagatcgggatctaatattaacagtttttaaaagctaattcttgtataatgtccttgattatggaaaaacacaattttgtttgctaagatgtatatatagctcaattattaaaaggctcttagaaaaaacgtatttaaatttaaagttaatgaattgtaaggaaaggcacttcattctcacctcgttatgtcatagaagaattagaatgtttcccagaaatagataaattatagttagcgatttgacaaacgaaagagaaattcattgtagacagtttagaattacgcattatagatgaatagttttatgcatagttgctttaaatgacacagtataaaagataaacatcactcttataagagtgatgtttatttttttatactgtgttctaacataagtgtatagaaaaacataataaaagtagggggggaagtgtagaggtaaatgaatattcttcagtagaagtataatatgatttttagtccttactaatatcagacgaaattaactatctcataaggcttatattgatggaggattaaagtgtttttataacaattggtgaataggtagctccttcatttatcattttagccaagaagattccttcctcaaggagcgtgaagggtcacagcacaatgagtaggttggagatgaattggcttgttcaacatacataaatcgcgactgcctctctttagaatacacgttcggtgtatggtagccatatacagaaatggaggtgaatcaaatgatgattaataaagcttataagttttatatctttccaaatcaagcacaagcaattctaatcaataaaacgattggttgttctcgctttgtattcaatcattttctttccttatgggatgacttatataaagaggcaggaagaggtttgacctatggtacatgttctgccaaagttcctgccatgaagaaagagtttgtttggctaaaagaagtggatattattgtgattcatttgtctgtttataatcttgcagatgcgtatacacgctttttcaaaaaataaaacagcgcctcgcgctttaaatctaagaagaacaacgtacaatcatataccacaaaattaaacaaacgaaaacattgccagtgtaggtaaaaaataaagttgccgaaagtcgcgaagtaaagggacgtattgtaaatgctacagttagacggaacccttctggcatatactttgtttcattgttagttgaaacagaagtacaagaacttccgaaaacacattcttacatcagaatggatatgggactaaaagattttgccattttgtcagatggaacaacctataaaaatccgtaattttttcgctcattagaagcgaaggtggcgaaagtacagcatgttctttctagaaggacgaaaggatcttctcgctggaataagcagcgagtaaaggtagctaggatttattaataaatggaaaaatatagaaaatattacttagacaaaatctcgactgaaatcatcaaaaaccatgatgttatcggtatagaggatttgcaagtatcgaatatgttacagaatcacaagttagcaaaagcaattagtgaagtatcatggtcacaatttcaagccatgttggaatacaaagcaaaatggtacggaaaacaagttattgtcttatcgaaaacaattgcttccagccaataatgttcttgttgtggatatcaaaacaaagacgttaaaaatctaaacctacgtaagtgagactgtccttcttgtcgtacacatcatgatagggatattaacgcaagtatcaatctaaagaatgaagcaatatgacttctaaccgaaaggactgcggagatagcctaatcaattagagttcgatagaattctttacttaggaatccctcacttctaaatgaagtgaaagtgggggtagttcaaaaaaagcatagatatcttcttctataggtgaagatatctatgctttttctttttaaattaaagatatactttactcatacggcagggaaaattattaacaggagataatatccaattctaataattgtataaatagtttgaacatgtttgaaaattaaccaaacaatttttgttttgaaaaatggattctctaatacacctgttaatgtaacgtatggaaaggagaatagaagcagttaagaaagcggtaaatggatgattaactagatttaagaaagatgaagggtaatttttgagaaataaaataatcaactggaatgattaggaatttcggtattgtgacagttttcaaattttatactagtaataaataaattactttttgaaagtaatatcattacaaaaggtacttggaatcttcttgcttattccatgattccaagaaaaatcgccatttacacactagtggaccaaaatacagaaacaagcgaacatgctagatttgcaaataatggtggtgtctcatctggtatatgctgggtattactgtagatgatttagggaggagcatgatggatggctaaatgtaggctttcatgtttaaagtatgatccttcctataccatatacaaattatgcgtataacaaaagtgagaatgattcctatgtttaagacttaattaataattataatcaaagttagagttgtaattgtggttgtaaataagcactttcttaaaaatattcgttattatcaggctaatttagtatctttaattttaatatattacttaatatttaaggaggaattttatatgaatagtgtattgaatagcggaagaactactatttgtgatgcgtataatgtagcggctcatgatccatttagttttcaacacaaatcattagataccgtacaaaaggaatggacggagtggaaaaaaaataatcatagtttatacctagatcctattgttggaactgtggctagttttctgttaaagaaagtggggagtcttgttggaaaaaggatactaagtgagttacggaatttaatatttcctagtggtagtacaaatctaatgcaagatattttaagagagacagaaaaattcctgaatcaaagacttaatacagacactcttgcccgtgtaaatgcggaattgacagggctgcaagcaaatgtagaagagtttaatcgacaagtagataattttttgaaccctaaccgaaacgctgttcctttatcaataacttcttcagttaatacaatgcaacaattatttctaaatagattaccccagttccagatgcaaggataccaactgttattattacctttatttgcacaggcagccaatttacatctttcttttattagagatgttattctaaatgcagatgaatggggaatttcagcagcaacattacgtacgtatcgagattacttgaaaaattatacaagagattactctaactattgtataaatacgtatcaaagtgcgtttaaaggtttaaacactcgtttacacgatatgttagaatttagaacatatatgtttttaaatgtatttgagtatgtatctatctggtcgttgtttaaatatcaaagtcttctagtatcttccggtgctaatttatatgcaagtggtagtggaccacagcagacccaatcatttacttcacaagactggccatttttatattctcttttccaagttaattcaaattatgtgttaaatggatttagtggtgctaggctttctaataccttccctaatatagttggtttacctggttctactacaactcacgcattgcttgctgcaagggttaattacagtggaggaatttcgtctggtgatataggtgcatctccgtttaatcaaaattttaattgtagcacatttctccccccattgttaacgccatttgttaggagttggctagattcaggttcagatcgggagggcgttgccaccgttacaaattggcaaacagaatcctttgagacaactttagggttaaggagtggtgcttttacagctcgcggtaattcaaactatttcccagattattttattcgtaatatttctggagttcctttagttgttagaaatgaagatttaagaagaccgttacactataatgaaataagaaatatagcaagtccttcaggaacacctggtggagcacgagcttatatggtatctgtgcataacagaaaaaataatatccatgctgttcatgaaaatggttctatgattcatttagcgccaaatgactatacaggatttactatttcgccgatacatgcaactcaagtgaataatcaaacacgaacatttatttctgaaaaatttggaaatcaaggtgattctttaaggtttgaacaaaacaacacgacagctcgttatacgcttagagggaatggaaatagttacaatctttatttaagagtttcttcaataggaaattccactattcgagttactataaacggtagggtatatactgctacaaatgttaatactactacaaataacgatggagttaatgataatggagctcgtttttcagatattaatatcggtaatgtagtagcaagtagtaattctgatgtaccattagatataaatgtaacattaaactccggtactcaatttgatcttatgaatattatgcttgtaccaactaatatttcaccactttattaaagtttgaggttcttatgtaaatataagtttatagtttttgatctatctactaaaattaagtatatataatgtatggatgttagaggttgtcttaaagtagttgaatgattactctgaggcaacctctttatttttattcttaggaattcacaaatagtaaaatgatatttcagctatacaaaaaaataaccatagataacataaaagttttcaaaaatacaattaaaaggaatgagataataaaaatacttaaatttaaagaaataacattgcatactattattaattttttgtgacattattaaacctcggtactgtttccaaatgaaaatatgagtatttatgtcaaaattgcaatatatttataatcataatatatgtttgtgaattaataaactaattattttatgtgttttatgtttaatttagtgaaaattagcttttaaatacttatatatatatgattatcattaaggaaaaacaaaatgatttcttagtaggacactattatgagctaaattaataaaagttatttagtaaaataattatgtgtaagatagggggaagaatataaggtgaattttaacaaaaatattattaaatatggatatggattttagcgataactgtagaaatagaaaattttacagtgaaataactacttacatttatgaaacaaagggaggactgagttcttaatatagggaaataatctcagtatttagttcaattctatgttaataatctaggggaaatagcttacttcgtattgaaattaatgtgaacgtgtaagattttaaatccaaaaatttatatggtccattgccagtgggccccaaaataattattaatatcacactttgtgttagacaaggtgatttagaggatgtaaccaattttgaaaaactgttaattttatgggaattcgtaaaatatattctaatacaataacatatgttacaaaaatgaaattgcgatagcgagcgaagtacatggtaaaattggtacaccattcctagagaatgggagcgtaactttaaatgcaaaatgtaattctacaaacactttgacgtacaaaaaccatggaattttagattatgtggaaacggtttaatctattattatgctcccgcatactattgcctatataacggtattattagatgtgaaaatcaaagagggagtcttcactcataacttggagaatgattacccttagttcaatataaggtaatgaataaaagcaggcaaagttagacatattggagatattcataaattcaaagctcttctataattactgatgatccagactactattcagctaaccgaggatggaattttttaatgagaatactgtaacattttaaatgtgttatttgaatatacggacataaaattagaagggtttttttgaaaaagtttaactataaaacccaatatattatcacttgagcagaaatctacaaaaaaatggattaatttaataatgtgcatacctcaagtttaatttataaaatacacttgaggtatgtatccatatagttctttaaactattaatatgcttatttattatatagaatgtcttccgaatgaaacagcaaacacgaaaataatattatagcatcaatattaaaagtaacttttttggatatatatgagcagttgatttcaacaaagactttttccgttactatatagaaacccatatttatgttgatagcataaagactattgaagggagcttgctttagatcaattttataacggatcgagtaagaaaccttgatagacacatcaagaaaaataaaatttttcttatgaattaaaataaaaacagttcgaaatatatacccgaattacaattatatttattgaatctaattcttaataacttattataacaatggagtgaatttgattgtcatttataaaaaatagtaagataggcactaaattaaacggattgataacgatatctatcgtcgcttgtataaccctttccacaataggttttttttgtttagcagaaagtaagaatgcttcaactaacatgtacgaaaataatttattgtcaatccaacatattggatctgtagaagcgaatattttccatgttaatatgaatttaatggagatgatgatatcaaaagatgaaaaaagaagtaaagaattactggcggagatcaacgatgctcgaaaagaaaatgataagttattaaaacaatttgagtctaaaattagttctaacaaagaattaaaattgtataaagatttttacggattatttgatgaattaagaatacaaataaaaaaaatacaagatataaacttatccaataatgaagacttatttacatattatttaaaagagattgaaccaaatattaaaaaggcaatagaatctatccaggaacttattagatataacaaaaataatgcacaacagttacagaaatctaatatcagcagtataaaaaatacaatgacattgtttattagcatatcagttttagcaataataattgttactttaatcggttattttattaaacgtgcaatcaagcaaccaatcatattattacaacaagacatggaaaaagtatctgcaggtaatttaacaatacgcacttcttatgaatctaataatgaattaggacatatagtacactcttttaacaatatgttagataatctacaacaactaataggaaatgtaaagagtacagccaacgaggttatttcttctacagaaggtatgttaaaaaacacaaaaaaagcatcttatctatcaaatgaagttgttcaaaatatttctgaagtaaataccaaaatagaaggacaatttataagtatccaagagaattcatcatcattaaaagaaattgctaccggagttcaaactatcgctgaatcatcaaaaatggttactgaaatgtccgttgaaacaactgaacatgtaaattcaggcagtgaagaaataaaacaatccatccttcaaatgaatagtgtacatgcagtagttgaagaaacctctatagtaatagatacacttgttacacgcacgcagcaaattgataaagccctagatgcaattactaatattgcagaccaaactaatcttttagcattaaacgctgcaattgaagctgcacgtgctggtgaaaatgggaaaggatttgcagtggttgcagaagaagtaagggatttggcagaaaaatctaaagagttcgctaatgaaataaatcatttaatcaaaaatattctacaagatacaaaagctacagttgatgtaatgcaaagggggaaacaaaaagcaatagaaggaaaagaagccgctcagaaggcaaaccaagtattcttttctgttgtaaaggatattgataagatttctagtcaaatgcaagaggtatgtgcagcaacagaagaaatgtctgctggaacagatgaagtgaatatatcattgtcaacagtttctaaaacagcagcacaagtagctaatgggacaagtcatgctgcacagtcaatccaagaacaggcaatctcaattgaggatattgccaatcaatctaacaaagtaaagggaaaagtagaagaattggtacagttagtttcacaattcactatagagggacatggaaagaaggattaaattatataacgtaactttcacttgacttagtaaaacatgtattggtgcaaaaaatggttctattgtgaatttttaagagataaaatttaggtatgattgctagtgatttttgcaatttatcatacgtagaaaaaacgaagtttggtctttataaacttcgtttttttttatatagaatgaacggtttaaatgccctttaaggaaagtgaagcatgacgaatactttaaaatcctaagaattttgcaacacgtctttttatatttctatgccaatggtcttgctcgatgttcgcgttcctttcgaaattggaagcctagtgtatgaccattattaccaattggacaatctaaaagctacattctctgttttcctttatataggaccttttaatttctaaaatgataattgtataaaaagaattaatgttatttaagatgttgaaatattgttaaatctacaattttagcgttacttaaaaataaattatattaagcaacattatttggtgtctttaaagttttttgattattgaatgatattaagtataaaaacagaaagaagggatgaatttggataataactccttgttaatagtatgctttaaaaatcatgaaaactaaaattgtagtatttttctccataacatccataatttttttcatagtattcacttatgtatataatcagaaattacctaatcataagtatccacaatggggtgaatttctaaaatatatttcttaaacaagatagaggagtaagtttaagacggatattaaattaattgaaattggacatatttagagtatagaaaaactgctgaggaggaaattatatgaatattcgagaaagtgaattgccgggcatcggttataaatttcatattgtcacaaaagataataataaaatggtaatcgtgattcatgatgatggacgtagagaaatgtatcattttgatacagaccacgaagaaagtatctcaagtgtctctttgtgtgattcagaggcaagaaagctcgcagcaatattaggaggaatggtatataaacctcaagctttagaaacaattgaaatggcatttgaaggaataacaattgaatggtttaaagttgaaaataaagctcttgccattgaaaaaacaataggtcagcttgaaataagaaaaatatacaatgtaactgttatagccattataagagaaaacatgaaaaaattatttaacccaggaccagaatctgttatcgagaagggggatatgttagtagtctctggagaaagaaacgaagttaaaaaacttattaatgaattactttcaaatagaggagactgactagatggatactttaatttttgaagttggtacagctctaattttagtagcaattgcagcagtagtcgctggaaggcttaaattttcaattattccttttttaattgttctggggatgttagttggcccacacgctccggtaataggtgtaatcgattttagatttatagaaagtgaaagtgtaatctctttcttgggaaggataggagtactttttcttctattttacctaggattagaattttcaatgaaaaagctaattaaatctggtcgttctatcgcgattggtggaacaatctatattttgattaatttttcgttggggttactatatggatttttgatgagattccctttattagaaactttgattatagcgggggttattacaatttcttctagtgctattgttgcaaaagtactagttgatttaaaaagaacagggaataaagaaacggagctaattttaggaattatcatgtttgaagatatattccttgctgtatatttatcagtggtttctggcttagtccttggtgatcatgcttcattcttaggtgctcttacctcaattggtatagctttgggatatatgctcttattctttattgtagctagatgggctactccgttattaaataaattgttgaatattagttcagatgaaatttttattatagtagtattttcttctttattctttatcgctggtttttctgaaacaattcatgttgcggaagcaatcggagcacttctgttaggtttagttttttctgaaacagagcatagtgatcgaattgaacatcttgttgttccatttagagacttttttggagctatcttcttctttagcttcggtttaggtatagatccgttttcgttaggtggagcgatatggctaacgttaggtgctgtactactgacaatcattgggaactttgtagcagggatgattgcaggaaggcaagctggattatctcataaagcatcgacaaatattgggttaacaatcgtgtcaaggggggagttttcaattattatggctaatattggtatggcgggtggtttaatgtcagtattgaaaccgttctcagcactatatgtacttatcctatctattttagggccactctttactaaagaatcgagaaaaatatataaatttttaaataaaatatttaagtgggataaaaaatctgcttaaatttagggaaataaaatctttttaattacttgcatttttattgtagagtttctgtagtttgcatgaattgagggattgaattccttgtgttaattaacatatatatcgatttgaaataaaaaaggagctaaaaggatttaatcaactgttagctccttttagctcctttttaggtatatcgaaaaaaaatcaaatcatacatcacgaaaagaagtttttaagaaccattcctaaaatttcaaggcattttagatgttttatgtggaaaagcatggttaacttcatcaataggtgaaaatatctatgcttttttatttcaggacagagatatactgtactcataaatatagaaatatgtatttaagaaagattgaaagcgtattaaataatctgataggagatgtagctatatgacagtattcaatgttaaagaaattaataaaataccttttgaaagtaatatcattccaaaaggaaaccgtaaccgtcctgcatataccatgaatccaagatatatcacaattcacaccactgcaaaccaaaatgcaggtgcagatgcaagagcgcatgctagatatgttaacaatggtggtggatcatctggtgtatcctggcattttacggtagacgatcatcggattgtacagcacttaccactaaatgagaatggttggcatgccggagacgggaatggagcgggtaatcgctcgagtatctcatataactagatactcacgggtttataggtaaatccctttcctaaaaaacctaactttatcatacgaggaggtgcggtaatatgaaacgatttataagtacggaaataaccaccacctgcatgacaaaaaagcagagtaaggtgatttatagatgtaacaattaaacttttaggaggagattagaagatgaataacgttataaatgttggggtattaggtttaggtacggtcggaagtggtgttgttcatattttgaaagaacattataaaaaaatcgcacttgatacaggatacgaagtgaaagtgaaaacagtcgttgtacgtgatttggaaaaagaacgcgatgtttgtattgatggaattgcagtaacaagtcatgcagatgaagttctaaatgattcaaatattgatattgtagtagaggtaatgggcggaattgaagaagcaaaacagcatattgttaaggctttacgaaataaaaaacatgtcgtaacagcaaataaagatttaatggctgtatatggtgcagagcttcttcaactggcgaacgataatgattgtgatttatgttacgaagcgagtgtagcgggcggtattccagtgttaagaggactaactgatgggttagcatcagatcaaattgaaaaaataatgggaattgtaaatggtacaacaaattatatgttaacaaaaatgagtcaaaatggatggtcttatgaagaggctttacaggaagcacaaaaattaggctttgcagaatcggatccgacagcagatgtagatggactagatgcggcgagaaaagtagcaattcttgcaaacttaggtttttcgatgaatgtttcattagatgatgtgcaagtaagagggattcgaaaggtcgaaaaagaagatttacaaatggctgaaaagttaggatttactatgaagttaattggtaaagctgaaaaacaaggaccagccattcatttaagtgtagaaccgacgcttttaccgagccagcatccattatcaaatgtgaataatgaatttaatgcggtgtatgtccatggccaagcggtaggagaagtgatgttttatggacccggagctgggaagttaccgactggttctgctgtagtaagtgatattatttcaatcgttaaaaatatgaatcaagttccgaaaaataaaagtgcgttaaaagaaccagttccttatgaattacaaggtgatgaagaagtagtttcgaaatatttcttacgcatttcattacaagatgagcctgggatgttacaaaaaataacagaatgtttcgttaattattctgtaagtttaaaagaggttattcaattacctttaaaccgtgaactggcagaagtcgttgttgtgacacatcgaacttccaagtatcaatttgaacgagttttagaagcgatagaagctgtcgcaagtgaaataaacagttactacattattgaggaggaaaaacaatatgtataaaggactattaaaacaatatgcgtcttatttaccggtgaatgaaaatacacctgatgtcagcttaatggaaggaaacacaccacttattccattattaaatatatcaaaacaattagggattcagctatatggtaagtacgaaggagcgaatccgacaggttcttttaaagatcgtggtatggtcatggcagttgctaaggcgaaagaagaaggttcagaagcaatcatttgtgcatcaacaggtaatacatcagcgtcagctgcagcatatgcggcacgtcttgggatgaaatgcattatcgtaataccagaaggaaagattgcacatggaaaattagcgcaagcggtcgcttatggagctgaaattatttcaatagaagggaatttcgatgatgcgcttaaggctgtaagaaatattgctgcagaagagccgattacgttagtaaactcagtaaatccttatcgaattgaagggcaaaaaacagcagcgtttgaaatttgtgaccaattgcaaaatgcaccagatgttctagctatccctgttgggaatgcagggaatattacagcgtattggaaaggcttctgtgaatatgagaaagaaaaaggttataaaaagccaagaattcatggctttgaagcggaaggagcagctgcaattgtaaaagggcatgtaattgaagagcctgaaacaattgcaacagcgattcgcatcggtaacccagcaagttggtcgtatgcagtagaggctgccgagcagtctcgtggtgaaatagatatggtatcagatgaagaaattttacatgcgtataggttattagcaaaaactgaaggagttttcgctgaaccaggatcaaatgcttcattagccggcgtaattaaacatgttcaatctgggaaaatcaaaaagggagaaacagttgttgcggtattaactggaaatggtttgaaggatcctgatatcgctatttcttcaaatcaactagacatcgcaagtgtgtcaaatgatatagaacaaattaaagatcatattaaaggggtgattatgtcgtgataccatttagcgttcgtgtccctgctagtacggcgaatgttggtcctggatttgattcagttggaatagctttgtcattgtatttaggtgtggtggttaaagaaaaagctgataaatggcaagtaatccattcctttgaagaatcaataccgacagacgataaaaatttaatcgttagcacggcatgtaaagtatgtccttctatatcaccccatataatagaagttactagtaatatcccattaacgagagggctaggaagtagtgcatcagcgattgtagctgggatagagcttgcgaatcaactaggcaatttgaacttaactgctgatcaaaaagttcaaattgctacaaattttgaaggacatcctgataatgttgctgcttctatattaggtggaactgtaattggagcacttgatggaaaggatgtttccgtcgtaagaattgagagcaaggaattgggggtaatttctctcattccgaatgcagaattaaatacagatgaaagtcgatctgtattaccaaagatgtttccgtttcatgaggcagttaaagctagtgcgataagtaacgtattagtagctgcattatgtcaaaagcggtgggaagttgtaggtgaaatgatggagagagaccattttcacgaaccatatcgtttagaactcgtaccattattaccatctattcgtaaatgcgcaaaagaatttggtgcgtacggcacagcacttagtggtgcggggccatctatttttatattaacgccatatgagaagcgtcaagaaatcgctgagcaattagcgagagtatttacagatatgaaagtatgtgagcttgaaatcgaccataaaggtattattgtaaataaggaagagcatattggatcgtaaagaaagctggcatggctagctttctttacgttgcaaacctattttaaattaggttttttcggaaaaatataaaacaaatgttgattttgaataatgtaagtaaagagtgcattcattttggaggtgattaaatgaataaagagtcaccagaagaaaaaagagagcgtatgagacaaagtgaattaaaaagtaatcctacgggttctttacgtgacggactcaatagagcggaaacgggtagtccagttgatatagcaggcggtatgaatcggaaaggtacaggaataatcattttagtactacttttaggatatattgtatacacttattttttcagttgaagaatgcttgttaaaattttgatttgtttagtttcataattgttgagaaaaaatgtagttactgtattacatattttctaagcgaattatagttgttcatatcaacttttaatactccaaacagagctagcaaaatgctagctctattattttttgccacattcctgtaacaaagcatctgtatattcattggtggaggtgcagaggatgaaaaaaatgatagcgatatgtcttcttacaactatgtcgttttcgactttagtcggttgtgacgtaaaaggtagtaatgctgtacaagagtctaaaataaagaaagcgacgtataaagattttacttatgatgtaaatccagaaacattcacattaactgtagaacatgagggggcaaaggaacaggcatcacaacccctaccgaaaatgaaggtatcgaatgtaaaaaaagaaaaggatcgtacatcgtgggaatatccagatcaaaaagtaaaaataaaattagaaaagaaaaaagaccacttaaacattgaagtggaatcgactggtgcagaaagctttacatggccgaaagtagaagctgaaaattatacacttccgttatgggagggtaagcaaattccgagcaatgatgagaattggaagaagtttttaaaggatgatgcatattcatttgctgaatcattttctatgaagtttttcgcattaaatggttcgagatattcaattgtatatattgcaacgaatatgtttaataatgaattgaaatttcattcggatccgaaaataggatttgattttacacatgaatttccgagcataaataaaaataaaacatatggatttcaattatatgtgacaaataatgatgcggtaagcattgctaaactgtataaggatgatattgttcgaaaaggtgaatttaaaacattacaagaaaaggctagaaaaaataaagaaatcgaaaagttatatggagcggcgcatttttatttttggaatcaaaatggtttattagaaaataatataaattggccaaaactaagggagcaaataaatagcccgctgtttagtcatataaaagaacttattcaaaagaatagttccgagcctggggaactgaatgtattggatcaagtaagtaaacaagatttcattgataagtatcaaaaaaatgttattttacgttatataaacgaagtattatcgatgaaggaattttataaagaggatatttttcaaaacgttaatcaggaagctagtgtgctattaaagaaaggtgtaggtcacttaacgaatacagaattgtatagcttaaataagcatttattaaagtcgctacttggtgatgcggttgaagaggtaagtaaatggggtaatgcagatggaacggatatattaaaggaaatgaaagaggcaggaatagaaaaagcgtggattggtctgccgaactgggaacaaggatttatgcaacctaatttcgtgacaaaagctaaggaaatggggtatttagttggtccgtatgattcgtatcattccattcacgaaaaaagtgataaaaattggaacacagcatcctttaatgacccgtcattatacgaagaggctactgtaacgaagaaaaacggagaaaaggtgcaaggctttttaggaagaggtcgcaagttaaatccgactttatcgctgcctagtgtaaaggaacgcatgaatgatatattacaaaatggtcctaaatataattcatggtttattgattgtgatgcgacaggtgaaatttacgatgactattcagcgaaacatataacgacacaagagcaagatttaaaagcacgtttaaaacgaatggactacattgcgcaagaaaagggtatggtcgttggttctgaaggcggaaatgattttgctagtagtacgattgcatttgcacacggaattgaaacacctgttattaaatgggacgatgaagatatgcggaaaaataaaacaagtccgtattatgtcggtggatattggtcaccaaatcaaaatgtgcctgaaaaatatgcaaaacaagtaccattgaaagaagaatataaacaagtatatttaaacccagtatattcggtaccattatataaattagtatacaatgattccgttattacaacgcatcattgggaatggggaagtttaaaggtaaaagatgaagttggaaatcgaatgctgtctgaattattgtataatgttcctccgttgtaccatttagatgaagtagagtggaataagcataaaaaagaaattacagagcatctaaaagtttggaatgaagttcatgaaaaagcagtaaaagaagagatgacgaattttgcgtatttgtcagaagataagctagtacaatctgtttcttatggaaaagatattaaaatcattgtgaacttctcaaatgaagacatggaagtagaaaaaacgaaaataaaagcaaagtcggcttacattgataatcaggggaagaaaagtgtgtatacgccgtttgagaaataataaagttaaatatactgtattcatagagattttataattagctggattctttattcatatcgtttgttaggaaaaagacattctaatttaaaatgaaagagttaataaatttgtaaatccgtatgttgcgaagtgctaaatttttgaaattggtaaatagtgacttgccaaaaataagtacgagagtataatgtgaaatggaatacgtattgggtttaagtagtaaccttacaaaattgtaaggttagtgaaaggaaattcaatatgaagataaatagacttacattatacttggtaaagagaaagagaggcgaatgggtatgagctctgaattagaacaaaatacgagaagtaataaaaagcgttctaaaagaaagtcaatgaaatggttcatattaattccatttttcctacttatttttggaggagtaggatatggttcgtttatatataataaagcaaaagctgttgtaaatgatgcgtatgcaaaaattgataagtcatcaaagcgtgataaagaagttgaacctttaaaggataatatttcaatattaatcatgggtgtagatggaagtgaaatgagaaaaagccaatatggcgaagcagttcgaacagatgcacttttattagcaacaattaataaagatgataagtctgttaagctagtaagtattccacgtgattcacgtgtttacattccaactagaaaaaaactagataaaattactcatgctcacgtatttggtggcgtagaaagcacacgtgatacggtggaaagatttttaaatgtccctgttgattattatgtgaagtttaactttgaatcattcgtacaaattgtcgattcaattggtggtattgatattgatgtaccagttactttcactgaacaagatagtaaagaccaagctggtatgatccatttagaaaaaggttaccaacatttaaatggagaacaagcacttgcacttgcaagaacgcgtaaaattgatagtgacgcaatgcgtggacagagacagcaacttgtaatagaagcaattgctaaaaaagcgatgtctgttcaatcaattagcaaaatgggctctttactggatgcggttgataaaaacatgaaaacgaacttaacatttgacgatatgcttgctattacaaaaaatatggcaggatctaatttggaaatggaaaaaatgcaaatagaaggtacagataaacgtatcggtggtatttattattacattccaaatgaaaaaaatgtaaaagacatttccaaaaaattaaatgatcatttaggtgtaacgccaaaatcagtccgaaacgaataataaaaaaagattggcttttgccaatctttttttatgggaatgtatttgtaacttttctgtaacgattttttagtttagaaaaattatactcatatgtatgagtataatggataggtaaaaaagtaaaaggacatattcaaaatttgtggtaaggaaagatatcatatgcagaaatggttaagcatgatgggaattatctttatattgactggatgtaaaatgtctgaggctccaacaagtctaatggaagctcctacaaatgaaaaatggattaatgaattaaaggaacaaattgataaagatttacctgttaattatcgcttacttactccaatgtctaacaaagataaacagatgatttggtcaatgaattttaaacaagataataagaaagaagccatcttattttataaattgccgaatgaagatcatagcgtatatttagccgtatatgaagaaatcggaaatggctggagaataaagtccacacataaatttgatggtggagatgtagatatcgttgaagtcggtgattttacagggaacgggaagagagagttgttaatcggaatctctgtaaatcgtgaatcgttagaacatgttatgtatgttttttcggaagaaaatgaagatatgaaggaaatatataatcgaagttatacgaagttattcatagaggatctaaatgaaaatggactgaaagatataagccttgttacatttgaaaaagatgagaagctgacagttgagttcatggaacaatttaagactttatctgaagtgtcatacgatccatttataaatagtattcaaagaatacaaatgggtcgtatatctaaatcactaaaggcggtggtaattgatgcaggagttggcgctcattcaggtataacttatgtagcaaaatttgatcaggatcattatgaagtattacctatagatgggaaagaagatttatttaatgaatatgttgtagaaagtaaagatgttaatgaagacggcattattgaatttgttcgtactgtacgtccaaaaggttgggaagataaatcacatggtgatagtccgctttttgaacgttacatacagtggagtgaatctggaattaaaccaattgaagaacgatatatagatatagaaaaagggtattatgtgaaaattcctaaagagttaatagggaaaattacaataccagatcagcaaaaagaatcaaattctcaaaagtttttggatacaagaacaaatgaaatatggcttgaagttcatatttttaagcggaaagaatggttcaatataaaaggctacagcgcagcaattaaaacagcttctcacgtatatgcagtaccgaagcaatcgaaatttgaaaaagtgaaagcatatataaaaccgctagcggattatcaacaagagtaggaggtgggaattatgtcaaaaattttagttttagaagatgaattaacaatccgtagctttattgttttaaatttaaaacgtgctggattttatgtaatagaagctactactggagaagaagcgttacagattttgagtgaacaaactgttgatatagcactgctggatgtaatgttaccggggattgatggtttagaagtttgtaaggctatcaggaaagaaaataaaaaaatgggtattattatgttaaccgcacgtgtacaagatgaagataaggtgcaaggactaggaataggtgcagatgattatattgcaaaaccgtttagtccagtagtattaactgcacgtatacagtctttattaagaagaatagaagtacatgaagaaaaaacgaatattgttacgtcaggtccattttcgttaaatattatagaagaaagattgtataaagatggacaattagtcgatttaacacctacagagtatatgatattacagtatttaatgaatcaggcttcaaagccagtttcgcgtgatgaaattttaaatatgatttggggaactaattacgtaggtgaaacgaaagtagtagatgtaaatatgagacggttacgtcaaaaaatagaatgtaatccatcagaacctgaatttattcttacggtgtggggaaaaggatatgtgtggaaggaaagtataagatgaaacggaaagtgactctatattttatgacggtcattacacttatgcttgtattatttgaagttgtattttcagtctcaatttatcgatactattataatggtattgtgcaatatatagagtctcatgcgaaaacgagtacacgttttttttcagaatacaattcactatactttattcgattacaagaatatagtggtgacataattagtagctttcaattagaaggaacagaattacagttaattgatcgtcacggctcggttatacaatcttcaagtggtgaaaaggtagaaggtaaagtgaatattccacaatcattattagaaggtgaaatgtataatcaagttactacgaaaggtaataaaaaacaactagaggtgctaagcccacttatacatcaaggacaaactattggtgttttaaaatacacgactgttttaacaaatgtaaataaaaagattattgaaattattacgtttactatttctgtaggtattgttatttcgggagttgccttcttaattagtagacgtttggcaaattcatttgttgagccaattgaatccattattcaagcctcttcacaaattgcagaaggcacattaaagcaaaaaattaaagaagattatcctggagaattaggtgacttggcacatagtttaaattatatggcctataaaatagataaggctgagcagatgaaaaatgaattcattgcttctatttcgcacgaaatacgaacgcctttaacaggaattaaaggttggagtgagacgttaaaaacagtagatcatttaacagaagaagaaataaagcaaggtatgggcattatttcaggtgagacagataggttaattcatttagtagaagaattgctagatttttcaagattacaatcaaatcattttaatttatataaacaaaaggtgcaattgtacgatatactagaggagacgatttggcaattaactcctaaatcggaagagaaggaaattcaatttattactactatagaccgaattgaattgatgggagatcgaaataggctaaagcaagttttcttgaatattgttcaaaatgcaattaagtattcacatgaaaaaagcacaatacacattgaagcgactaaaatagaaggacaagcagtgattaaggtaagagacgaaggtattggaattgctaaagaacatttaccatatattgagcaatcattttaccaaattaataatcatgctgcaggtgcaggtattggtttagctatcgttaaaaaaatggtagagcttcatggcggtgcgcttagtgttacaagcaaagaaggaataggaacaacaattttgataaaactcccattataatacaaataaaatctatttatatggtgaaataaaaataaatagatgtataattatattgggcgatttatatataagattaatagggagaggaattcgatagaatggaaaaagctttaaaaattaaacaaatagtagtcgttttaatagcgattgccgcagtagctattgggtattacatgtttcaatcaattacttcaccagcaaaagctgttgcgaaacaagaaaatgtagtgcagcttgcaagtgaacagccgaaagttgaaatgaataaaacggcaccaagtcgttttaatggaaaagaaagaaaagttgcttatcttacatttgacgatgggccagggaaatatacggctgaattattaaatacgctaaaacaacatgatgcgaaggcgacgttctttttaattggagcgaatgtaaaagaatttcctgatttagtgaaacgtgaaaatgctgagggtcattatgtaggcatgcatagtatgacacataatttcgcaaagttatataaaaatggcgagtatgtaaatgagatgaaagaagatcaaggtttaatcgctaatattattgggaaatcacctaaattaacacgtcctccatatggttcgatgcctggattaaatgaaggtcttcgaaataaagtggtagaaggcggatttaaagtatgggattggacaattgattcattagattggaaatacaataaaatgccagttgatgcagctgcagcacaaattgctcaaaatgtattaacaaacgcaacaaaaccacaagaagtaattttaatgcatgatattcacccgcaatcagttgctgctgtgccagcaattttaaaagggctaaaagaaaaaggttatgagttcgaagcttatcatgaagaaagtcacttcccagtgaacttctggcatgataaccgtatgtaatggaggaatgaacgttgaagtatggaaaagtagcagtagttggagcattatcagtaggacttttaacaggttgtttcggtgaaaagccagaagaaaatctatatacagcttttgaaacagcagcaacacaagaaaaatctttagtggatgaagcaaaaaaattagagcagttagagaaacaagggcaagaattatatgctcaaattttgcaagaaggtaaagatcataatgaagcagttgtgaagaaaatagagcaagctactgcaaatgtagatgatcgtgaaaaagtattgaaaagtgagaaagaaatgctagaaaaagcacagaaggaaacgaaatctgttcaaagtaatatagagaagattgaagataagaagttacaaaaacaagcaaaagcagtagaagagtcgtataagaatcgttatgatgcattccaaaagatgaatgaaaattacacgaaagtgttagcgactgaaaaagaactgtatgaaaaattaaaagtaaaagaaacgaaattaaaagaaatcggtgaaaaagttaaaactgttaatgaattaaatgtggaagcacaaaagtcgaaagagcagtttaacaaatttacaaaagagtataatgacagtaaattagcattctacaaagatgcagaaattaagattaaagatcagaaataaagaagaatctaaagtgtaataaaaagccggagaaacatcgttataaatgttttttcggttttttacgttaaatgaatagaaaagactggaattgatatcataaaagagttatagtgagttattctaagggaaacattgtaaagtaaggagaatgggaatatgtcatatgaatttttactcaaattaggtttagcactctttttaggattattcatcgggatagataggcagctaaagaataaaccactgggtgtgaaaacaagtatggttatttctgtagcaagttgtttaattacgatggtttcaattgaatctgtgcatgtatattctgttccaggacatacaaatatggatccgatgcgactggccgctcaaattgttagtggaattggttttcttggcgcaggtgtcattttacgaagaagtaatgacgttatttctggattaacaacagcttctatggtgtgggctgcttcagctttagggatcgcaattggtgcaggattttatttacaagcgacagttgctatggttttaattattttagcgattaatgtacttccgcaacttgtgaaaattgcaggaccgtattcattaagacaaaaggatttatctataaaaattactgttaaagagcatcatgagttagatggtatatttaagcaaattaaaaatttaggcatgcatgtgaaacgcgtgaaaattaaagatatagatagtggagcatttcagcaactggagatggttattttagctccagaagatttatatacaacagagttatatagttccctgaaagagattgatcgagtagtttcagttgaagtggaaagtagataattgtgataaaaaagagtgaagtgaattcactcttttttatttggatttttaaggaatgaaattgatataatgatgagtaataaggggggagaaatgatgggaatacatattagaagagcaataaaggatgatataccaggtatagcaaaggtgcatgttgatagttggaagacagcgtataaagggatatttgctgacgaaattctagataatatagcatatgagaaacgagaaaaacaatgggaagatatttttcaaaaagaaggtaatcatcaatttagatttgtagcagagaatttaaatggagaaatagttggattcatcgatgggggagtagaaagaactggtacatataattgtgatggagaattatatgcaatctaccttttacaacagtatcaaggaatgaaaataggacaaaagttatttcaagctttattatcggattgtataaacaatgatatgcaatcacttttagtttgggttgttacgaataatccttctaaaaagttttatgaaaaatttacccctgaaaaaattgatacgaaatttttagagagagtaagggtagaagaaacagcgtattgttggagagatttaaatttgttacaaaaacaaacagctatatagaattatacatataataatattatgtaaacatattatagggaaaggtatacctcatttggtgtacctttttattaatccatcaaaaaatggattaataaaaaatagtaggtaattagtttgaaagcaagaaattttctagtgtacttttaactagattaaagaaaagaaagaaaaaaataaaaatttaatttgataaaaaaattctgaaatatactcttgaattgaatatcattatcaattataatatgaaattccgatagcgttaatataaagaggaggaactaacagtaagtgaaaacataagtaaacgtggatatgcgtaatgaaaaatataagctcgatgactgcatggagagaaatgtttcaaccatcaccatcgcacacaaagatagggttttccgttttgattatgattggtttgatggatttcttcataagttgggagtcaaagttatcattgttactaatgaaaggttgtctccacaagaagagtttgcttagtatttgatatctgttattcacatatttagttgtaggatatacagattgaggaaatacaaaaagagaatgtcggaggatgaagatctatgaaaaaagcatatctaatagagattaagccgacaaatgaacaaataaccaagatccatcaaacgattggagtgtgcaggtatgtttacaatctatatctttcaaaaaacaaagagatatatgaatccgaggggaaatttcttagtggctatgaattttctaaatggctaaacaacattcatacaaaagaatgtgaccagtggataaaagaaatatcaagtaaagctgtaaaacaagcgattatgaacggagataaagcttttaagcgattttttaaaggtttatctaagtttccacgctacaagaaaaagaaaaatgaagatgtaaaatgttatttccctaaaaacaacaaaacagattggatagttgaaagacatagagtaaaaatccctacgattggatggatgagattaaaagagtatggatatatttcaaaagatgcggttgtaaaaagcggaacgatagctaaaagagcaggaaaatattttgtatctgtgctttgtgaattggaagaaacaaaagcgaagccaacactccattcaacgggtgtaggcattgatttaggcgtgaaagatttcgctgtacgtagcgatgggaaaattcacaaaaatataaacaaaacaggaaaagtaaaaaagatagaaaagcggttaaaacgtgaacaacgctctttatcacgtaaatttgaaaatctaaaaaagagaggtgaacactctgttactaataaaagagcgaatatagataaaaacattcttagggtgcaaaaactacatgccaagttagcaaacattcgattagcgtatgtaaagtctgttgtaaatggtgtggtgaaaaccaagccaacgtttattacagtagaagatttgaatgtgaaaggtatgatgaagaataaacatctatctaaagcagttgctaagcagtacttttatacatttaaaacatggttattgacgaagtgtgaggaatatggaattgaactgcgtcaagtagacaggttctattcatcttcaaagctatgttcatgttgtggtcaaaagaaagtagacttaaagctatccgaccgagtatatgaatgtgactgtggaaatgtaatggatagagatttgaacgcgtcaatcaaccttttacaagcaaaagaatatataatactaacgtaaatagattgtatatatgtacggtgggctacatcggaatttacgcctgtggagtgttacagcaaactgtagtagcgagtgattggcgagacaggacacgtagaagcaggaatactctaagaatgtacatttatctatatttttagtagcaggaccaacatgcagcatgcgaaacaaatcgcagaacatgcaacattacaaagctttttaaactgttatttaagagaaacagggagtggagaatggattacagaggatgaaagaatgaaaagtatcttcagtaatacgttgaatagagatacagtccccacatatttatgttgtcggctatcggcacagaacgttactttgtatggagaagttatatataaatcatcaacagatcgccatttgtttggagaacaattttattatcaaattggagatagtaattccgttattacagcagattacgttacagttattacgtttttaataaaagagatgtcgatcaactacggagaaggaacgaatcctgcggaacttatgcttcgagttatccgtagttgtcaaaatattgaggaatttacaaaagagagaatagaagatacatccgcattatacggtttccatacaacttttatagaagcggagcagtctttattatttgggcatttaactcatcctacaccaaagagtagacaggggatattggattggaaaagtgcaatgtattctccagaattaaaaggggaatgtcagcttcattattttcgggcacataaaagtatagtaaatgaaaaatcattattatcagattctacaacaacgattataaaagaagaattaagtaatgatgagatggttagtaaggaatttatagcgaagtactgtaaggaagatcaatatgcattaattccaattcatccgcttcaggcagaatggctcttgcatcaagcttacgtacaagattggataattcaagaattgcttgagtatattggtcctgtaggtaagtattatatggcaacatcatcactaaggacgctatatcatcccaattcgaagtatatgcttaagttttcatttccggtgaaagtaacgaattcaatgcgtattaataaactgaaagaacttgagagtggtcttgaagggaaggaaatgttaaatacggctattggtgaagtacgagaaagatttccaggatttgattttatttgtgatccagcctttattacattaaattatggaacacaagaatctggatttgaagtgattattcgtgagaatcctttttatagtgaacatgcaaacgacgcaacattaattgctgggctagttcaagacgctatacctggggagcgtacgcggttatcgaatattattcatcgcctagcagatttagaaagtaaaagctgtgaagaagtaagcttagagtggtttagacgatatatgaatatttctttaaagccaatggtatggatgtatttacagtatggtgttgcattagaagctcatcagcaaaatagcgttgttcagctaaaagatggttatccggtcaaatattatttccgtgataatcaaggattttatttctgtaattcaatgaaagagatgcttaataatgaattagctggtattggagaacgtactggaaatttatatgacgactatattgtggatgagagatttcgttactacttaattttcaatcatatgtttggcctcattaatggttttggcacagcaggattaattaaggaggaaattcttctctcggaattaaggtctgtacttgaatcattccttccatataaccgggaaccttctacatttttaagagaattattggacgaagataagttagcgtgtaaagcaaatttactaacgagatttttcgatgtcgatgagttaagtaatccattggagcaagctatttatgtgcaagtacataatccactcgttagagaagtggctgttcgttcataaataacgttaaaatttcacgtaatacaaataatggtattttgtcataaggtggagggttttatgagagtggacatatatcatacgaaagtattgaaggcgctcgaatcagaagattacatttcagtacgaagaagagtgctacgtcaattagtagaatcgttaatttatgaggggattattacaccggttcgcatagaaaaagaagaacaacttctttttctaatacaaggacttgatgaagaaggcaaaagtgtcacgtacaaatgctatggcagggaacggatgacatttggacgtatttcgttagactcattaatagtaagagttcaagatgaacagcaagaaatacaatctgtctcgcaatttctagaagaagtttttcgggttactagtgtagaacaagctaaattagattcttttatacacgaattagaacaaacaatatttaaagacacgattgcacaatatgaaagaaataataagagagaatatactcaaaaatcttacgatgagttcgaaagccatttaatagacggccatccatatcatcctagttataaagcacgtgttggatttcaatatcgtgacaattttcaatatggttatgaatttatgcagccaataaaactcatatggattgcagcgcataagaattatgcgactgtaggttatgtgtaaatgtcaagataaacatgtacattttcgcttgtttaagcatgtacaaaatcaatcattttctttgctaaaatggcatttggaggtcataaagatatcttgcaatcgattttaaaaaatcaagcatctggaatagatgaagatgaaaaacgcctaaatgatgttttagagcaaataagacattttaaacaagtagaatcggatggaataataactgtatcatatccttcaatccctacatggattgctggaggtgtgatgataggggtagcaagaaataatttaggtacgttagagccgttattagtgcaattacgccaaaccgtagactataaaataacattaaatcgtgtagttggagttgcgtataataatattactgaaatgcaaaatgcaattggatcagctattaatgctcttacctatatgtcagcacaatggcatgatttagattctcaatattcaggagtgcttaatcatattgataaagcatcccaaaaagcagatcaaaataaatttaaattcttaaaacctaacctgaatgcagcgaaagatagttggaaaacattaagagcagatgcgtttacattaaaagaaggaataaaaacattaaaaatggaagctttttcttcaaaaaaataggtatatatagatttctttgcgaagtcagctaaaataatggggtattattggaaaaatgagaaataattacttgtattaataaattataatgacagaggtataataaatattaaatgcaccccaattgttaaaaacagtctaacaattggggttatagtttctttataattaaatttactctagaagaaaaacaaatgctgtaatacattatcaaagatggaagtgagaatataaaagatagtattaatagtgataggtaaggttttgacgttatcccccccttatcccccactttacaccgtacgtgagggagagtaagtagccagcgagttactaaaaaagtttagcatttttctaactacctctcctagaacagggcatgacagtttccgtggcacctagataatagttctgctgaatatcgaatcagcgcctaacattttcagttaggaacgtgtcacacaattataggattgaaaataagccgttccaaacgaaacggcagttatttttaatatttcttcatctgggcttattagaaaatacgcactcaacaacaaccaaaaggagtagaggcccttaagtcgaagaaaaagggggaattattcataaagaccaagagtcttaatatacaagttgtattttcaaactacattcaaaaagaatgggctttttcaagtgtctgtagaaaagaaccctttatgacgatgcatttgtggaatccttttacaaaatcataaaaagagagcttattcaaggtgctaaagtaaataatacaattgtacataagtagtcttaggcaattagattaattttctttttggactcatataccaatattaagtttaattaacatagtcaaatgctgagttatatacaaaaaaattatttgtcataatttttttatataaatgtaaggattaaaatgtacattttcacttgtttaagcgtgtacaaatttaatcattttctttactaaaatgatctttaattcgatacgattaccctaccatgctaacaaccgtggcatgatgtaagaaacggttgttagcatggtaggatcttgaaaaatttcgtctcatgatttgaaatttactttcgtggttaagatggtactacgcttttcataccgcatatcaatgaattgaaaaataattttgcatcctccggatcaattggtaaatatctgatttcagcaatgataagtaatttgtactttatatattgtttcaattgggattctaaacgacgctctagtttcgcacgcttcaaatttttaagcaaatcatgatatttaataaaatttaggtgttgcagaactcataaatatccaaaaatgaatgcataaaaaaatccgttttcctggaagaatgatagtaacccaaactatcactggaaaggatgtatttactagtatgataaccaattttgatcaaaaaaatccattttacaaattttatttgcgtatgtagaaagtttaatcattggagaagttccgcctattacaggtcgtccactcatttatagaaaaactttacgtaaattaacctgtcttttgcatcaatatcctttatttcttgtattttgtgactttccttttgttcctcgtatctctactttttcacgtgtaggtaacttggtttcaaaacgaaggtattccattgattcataaacaaactcttcaagaggtgaatttaggtttgattccctgtgttttaatcgatagtatggccttacggaggagtttatacgattctcaaacaaagaatagtctactcgttatggttggtataagaaatataaagctcatgtctgttctacaccagatgtcgtatgcatttacaacagcgaacgtaaaatggttcctgcattgctttaaggtatgcaaaaccaaaatgcgttgtttccgttgcagatgctgcttatgatagtcagcacgtttatgaaattgcacgaacatataatatctttgtcatgaatccaattaagtcacggattggtgaataaattaagagtacacatcattgtgtaatgtcgcattctatacaaaccatttttggtaagcagctgatgaaagagcgtggcatatcgatggctcatataaccattatgcgtaggttcatcaatatgggtcggaatgatgaaagagtatggagtcactttaagacaacaaatgactcccggagagtcgatgaaacatatatcaaaatggatgtatctattcgtgcagtggattctgaatacaacacaattgatttgtatttcagtgaaacaagagatacaaagaatgcaaagcgtttcttcaagaaagctttttggccttttcatgtttctaagcctcgcatcattacggtggataagaatccggcttatcctatagcaattgaacagtagaaaaagagaaaaacatgcctgtcggtatgtaatttagacaacagaagtactggaataatgtagtggagcaagatcatcgttttatcaagaagcgagttcgttctatgttaggattgaagttacttcgtacagctactttaattttaagtggcatcgaagctatgcacatgatcaaaaaacaaattgatttacgagatcattatgtccaaaacttttgaaaagaagttactaatagtatgtagtttcttgttgccccttatatatatcatttaattgtttcaaaaggtttttcaaatatatattagactcgattgtacaaattttgttttaaatataactgtttcaaatttatatatattgttggtaatttaaagattgataaataatatttatctttattttagatagacttaaattcgagtaaacgaaaatatattaaatgaagaatatataactcatctttttttttgtttattttaagagttagatataaataattctttgaatttcacgccggaaaaattttcaattaattagtcatactctaatgggatttttattacagctttaggactgactacatctcctatcatgaggattagtagatgtgtatgcatctggaacttgaaaattataaaaatataggtatggatatgctggtattagaggtgtatgggaaagagattcacttagttttatattactttggctaacctttgtataaagagtatatagatgtggtattaaatcgttggtacttctaaacagctacatacttagattgaagaggttttagtctacacatataaaacgactaaaccccggctaggtatttaaggttttgttacataaaattcatatctcctggaagagcttgtaaaaaatttagagttaataagttttgaatttcttgagagaatagttctaattattatatacaaaaaatggtgatataaagacatcatttcctataattttggagaaagaacttatgatttttttaactggatattgatgtgatcatcctcattaggaattatagttttaatataagtaattattgtaattagtttttatatttgtataatcttaatataaagaaataaaaatttttatatagtgtgaggggaagagtatgaaatgcagataaaagcagttactatagaagaaatctatcaggagatattggatggaaaaagaagtagattcccatccaatacttggaggtgggatgagaataatgaaatggctaaaagagtaacaagatatttattaaccgaaattttaaattggaacgaagaagagataaagcaaaattggaatgtctctttaattgcaaaatatcgattacgtggagtattgcagcatagatatgaaaatagtccgtatgcaatgattaatgatttataccctaatcaatttaaggaatgggaattcaaaatgactccattaaatttttggacgaaaaataaggctttacaattattaaaatggacaattgaagaaaaagaaaaattattaccaaaaaaaattttacgaatttatgggcaaaagtggttgaaggaacaaaaactaagtacgccattaagggtattttgggatgggagtccatatgcgatgattaatgatttatatccgaatgtatttaaggaatggcaatttactaaatcccctaataaattttggacgaaagaaaaagcattacaagcattaaaatggacaattgaagaaaaagaaaaattagatctggaagaattgagaaatatttacgggggaaaatggctaattcaatctggattgaaaggcgcttgtcaattatgttgggaggatagcccgtatgcaatgattaatgatttatatcccaatcaatttaaggaatgggaatttaagatgactcctaatggtttttggacaaaggaaaaagcactagatgcattacggtggacaattgaagaaagagaaaagttaacagatgaacaattactacaaaaatatacaattagatggataaaaagtcataggttatggacaccattaatgaaatattggaatggaagtccatacgcaatgattaatgatttatatccaaataaatatttgaagaattcattcagaggctatgtaaataagtcttaagtaattcgtttatacatttaaaaatcaaaaaaggtttcagattgtttggaaatacgttatcaactatagacagtataaagataaaattttagatatctttaattacttagctcggttttgttggtagaattcttttgctcacgtctcgtagctggatacagaataaaatttagcttattaaattggatgagttaaatttcgagaattttcccgctgaattgtaaaactttgttaaggacataacaaaaagctgttatatctgagttcacagtatttttagcgatgaaatttccattgattaatttataagatagcccatattttattggacctatggcctatttttatgatttagccgtacgtttacacgcgtcttaagtaaagaactacttcaagacttattaccatctatcttataaatacgatggtatcataaatgtaaagcgcttacaacaagggaataaaaagaatttatgaaaattctttttttgatttatgtcattttataaaaatgtatcaaaatatcaagaaaataattcatttccattactttatttattgtatttacttttgattgtatatttttaatgtcttttatacgattcaagttatacatactaattcaatagacacaaatattctattgaattagtaattgtattcatatttgtcaaaaacaattgtgaaatatgtaactaatattttacaattgtggtaccaggagtctagatatagcaatgttaaagaatagtttaagatttatgcaccatgaatgtaaaaatactacattgttatattaaatttaataattacttgatttttattattcttacacataacatttaagtaaatacttaaatgttattggggggaggatttttattgaatgatctttttaaagctttagcagatccaacaagaaggaaaatattagatttgttaaaggagagagatcttactgccggagaaatagcttctcatttcaatatgtcaaagcccagtatttctcaacatcttaacattctgaaacaatcaaatttagttaaaaatcgaaaagaagggaagtatgtctattacacattaaatacaaccgttgttcaggatattttgaattggcttataagtattaaaatcggggaggaaaataaataatgaggaaaaaaacatgttcatatcttattattatgattagtttagtggtaagtttcatatcttattttaaattaggggatgagaagatatggattctaagcattatgcccacgataatgcttatttcaaatgtaatatttaatatattagtgaaaaatacattattaactgagggaaacctagaaaatcaacttgatttaagaatcatttctaatgcaatgttaatgttgttatgtattattcatttagtaattgtaagtactgagtttggatatactattacttttgaattagtagtgggtatagcaactggtatattcattatggttttatctaactttatgcagcgagtagaacaaaattatatatacggaataagaaccccttggacattaaagaataaggaagtatggagattaactaatcgattctctgcaaaaatcttttttattacaggtttaatgataatactattatcaattttaaccccgaaatttgtaattttaagtatgattagtcttgtggcaattgctgctttaatatctgtgttttcttcatatatattttttaggaaaattgagaataaaaatatacaaagttgattacaagtaaaataatataaagaactcaaaagatgatctataataataggtcatctttttttgtgaaatgaaagggctattaattttacaattaatagcgtagaaaactataatttggattttatgaaaaaatgtattaatttttaaaaaaatgtgaattaaatcaccatacttccaaggaaattatatccaatagtgtaatttattttagatgcagtttgtttagtgtggggaaattaggcttagtaattgtaaaacataatattttataaaattaatatactatttgtgataaatttgtgaaattttgtgtctaaagatatcattcagtgtgtagcaaataatctgtatataaaaattaaaagagttacaatgttgtatcaattaattaattagctacttaattaattgttcttattatagttattaaatttggaggggtatatgaaacggttatacggttctacgcttgttttaacaggaatttttatttttattttatttctgatgggatctcaaaatagcttacctaaaaatcctataagtaatttaaagagttttactgtaatgaaaattttcccacaaggatgggggttttttagtaagccacctcgtgatgattatacatttattttagatgagaatggagaatctgctgtgggttggccaaataacactatcaaaaatgcatttggtataaatcgtggtggtagatcacaggggattgaaatgggattactagtggcacaagtacaaaaagaaaaattcaataaatgtgacgaagatattgatatatgtgttaaaaaaacacatgaaagagtgaaggtcaaaaatccaacacctaaaccaattttatgtggggattatacactagtaacaagaaaagtagtaccttgggcctgggcaggaattacatcgccttcagaaatgtcttcggaatttgtaaaggtggaatcaatatgttcaaaaaaataaatagttttgcttataattgggcgatttctaataatccttggactagtgtttatggagtagccaggtcgttaatagccttatctaccttagttactttaatttttaatgatgtttctacattattcaggcctgttgcgggggtagaagaatttccagcatgctcaatttattcaattagtatattttgcctagcttctggttcatatttagggctatttaagtggttagcagttttgattttactattagttgcttctggatggagaccaaggtacacaggtgttttacattggtgggttgcgtcttcaattcaaaatacagctataactcttgatggcggtgaacaagtcgcaactgtgctgactttgttactaatcccagtcacattattagataagagaaaatggcattgggagactggtttaaaagaaacaacatccaattctcaattgcattttagaataatatctttagtctttttagttgctgtaaagatacaaatgtctttcatctacttccaagcagcaattattagattgaagaatcctgaatggctagatggaacagcagtatattactattttagtgatcctatgctggggttgaatagcaccttagcgaatcttataaatccattactggcatcaccttttgtttttttcataacttggggtactacaattatagaactgtttttagcagcttctctaattggttcaaataaatattggaaaatatatctttactcaggtgtgttattacatgctggtattgctatagttttaggattacatagcttttcgataattatgtgtgcaggtttaattttgtcctattatccattaaatagagaatttaaatttatatcaaagttaaattctcttaagactaaaagtgaaaaggacattttagataagaaaaaatttgtatcttaatagtggttatcaccgacttattctataaaaagggagaaataaaatgaagaaaattgtagcatcattgatgagttttgctcttttaatgggcgtaatgtttcaaggaagtatgcaggctaaagccgctgtaacagaggcaagtgtaaaagttttttctggtgaagaattatttaaaggattattctttggacaaggaaaagtggcagaaaaattacctaatttctattctaaggagttaagaaaagctacaaatactcctgagatggaaaaacaagctaatgatttagtgggaaaagttaaagaaaaagatgcttcttatctagcagagttagaagctgcggtttattctaataatcctcaaaaaattgaaaaagccttaaataaaggtggagaaattttaacagatattactaaagatatgggcgtttcatcggctagcctagaagtggctgaagatgggactggaactgggcgttgtgcagttcttggattagttgcaatttattacgctgcagtagtggctcaagtagctgcaggtgcagtatatgttgctggcgctgcagtgtatttagctacagcagctgttaatacatggggtaaatctatgaatggtgataacctatctaatgatttattggtacacgatatcgttgtaaatctttaatttctaatttttggcaaacaatacaaatgagtttaagtcggttgagataataaatgaaacagttgttaacatatgtttagttgacaactgtttttatagttttgaataggtgaagtatcggataataaatctgtattgatgtcaattttataattttactgtcgtattggatacagaaaggagacctatatgggaaatattatattatttgatggagagtgtaatttttgtaaccaaagcgtacaatttattattaaaagagacactattggtaactttcaatacgcctcacttagaggggatgtcggaagagaattactagaacgatataatatagatgtaaacatagaaagtatagtcttaattaaacatagtaaatattatattaaatcagatgctgtaataaatatttgtaaagagttggattatccttggaagctagcagtttttctattattaattccaaagtttattcgtaattttttatatgataaattctccaaaaatcgatataagttatttggaaaacgaaatacttgtcaactacctccgccagaaataaggagaagatttttagattaatatatataagaataattaaatgaaaaatgggagaacatattttatttaatgtggctgacattgcacattttacacttccccctaaaggggcaagctgactaacatcattgggattcttgctaacaaaggcgaattccatttctggtatcgctgacgtgcaagttggtggtgtgacatcgccactctcatgacaaaccgatcgatttgtgtttagatgtttaagcgtcagctccttgatgaaacatattattttacaatatcataaatttggaaaacgaaatccatatgatatcttgtttttaaggaaaagaaaatccttttaaattaaatccaatatattatccaatttttcgttcttttttatgtttaaatcctcaaataaaacaccattttttattactaaatttatttttgataaatttttgatgttctttataggatcatcaggtaatactaataaattggctttttttcctacatctatcgtacctactttttcactaatacctaaaatttctgaattactctttgtaaccaaatgaagtgctttcttttcattgatgccaccaaaacgaatcatatgatccaattctcgccatagatcatagtgtgatacataagccattgccgcatcatttcctacacctacactaatgtcattatcaattgcttgttgaaaactaatcatcatatttgtatacacgatttttgcgttttcaaaaagtacatcattgatatttgttatgttcctgtctagtaatgtataggggtatgcagcttgaaatgttggaatcagtgacgtatatcctcgtaaggcatttggattttgcttataaagagaaatgatttcttcatccatcgtagcgccgtgttcaattgtatctacaccaccttttaaagcaatcctaactccttcggtactttctacgtgtgcggctaccatcatgccaattttatgagcttctttacaaatagcgtatacttcttcttcggttaactgaattcttcctgcttcaccaattgtctttgcatctgtgacgccacctgttacacaaattttgatcaaatctacaccttggcgtacattttttcgtacatttttcacaccctcccaaggaccgtctgtttctagggccaaatatggtgccccatgcccacctgtggcactaataaagaaaccggaaactattaggtctggaccaatcaatttttcattttgtatatcatcacgcaatttcacatcttgatagaaaaattcgccaacagagcgaagtgtagttataccagattgaaatgagactagagcattttttttcattctattgtaaataaatttctttcctaattttgtatctaataacttaattccaaaatttaatacttcttcactaaaagatagtcctgtagggcttccatcagaaaataaatgtgcatgtgcatttatgagtccgggcataacaaactgattttttatatcaatttgttcatattccttaggaataattatattttgacggttttcaattttttctataataccaagattattaactagaataaccatatctttttcaatttctcgattcatgtcgccgtttataatagtgcaattaagtaatgccgttttctttttcatataattatcatcctcaatttaaaagtaaattaataatttatttaaataaaaaactatattatttttcgcttactacatcttctcctaatcatccctgaactatactcaatgttttatcgttttccgacagaagactccttcctcaaaagtgttaaggtgtgaaacaccaattttaggtgggagatgaatgtcggttggtataagccaacatgtttgctaccatagacttgtacagattgctctttgaaaactgaagatatgaggttggttgtagaaaaacgttgcaaccgtaaaatcttcaacgttctttcgccccacgtttactgaagttgcgaaaaccaagctaaagtaggaagcgtggtgagtcaacgtataagatacttatgttttcaccgtagggactacgggcatagcctgctaagataaccggtggatacatcggtgttcgcaggaatctcccacttcaaaaagtctgtaagaatattaagtggtgagtagttcaaagtggtttttatataaacacaaacaatggttagtatattaaagagaagaatgtaggtcggtactaataaatgttgaaagtgattgtacagaatttttgaaagtgattatacgcatttcttttattttctaatttatccttttctaaatagccctaatacctctgttgattctgtaatatttacaaaagcatgtggatcgacttcagaaattatagtttttattctagctagctctactcgtgagattacagtcattaatatatattttttttcatttgagtatgcccctttctcacttaataaagttaccccatgtgcaaagttagaaagaaagttttctttcattttttctacatgagttgttacaatcattagagtaattttttggtgttttgtgtgaatcatatctatgactttccctgtaataaaaatagatactaaactgtataaggcaatatcccaattgaagaaaaatccagagataataacgacaatagtattaagtacgattaggaattttccaagctgaatatctttttttcgtgaaagcaatataccgataatatcaaatccacctgttgacccattgcaattgaatacaagtccaatacctataccagcaataacgccaccaaacaatgaagaaaggagtacgtcgtttgtcactacatgtattggaatagcatataatgctgtcgaaaatgtgataactgataaaattgtataccctatgaatttttttcaagtctaatataacctaatattatgataagtaaatttaaaaggaaattaactgatccagtattaaagggtgttaaaattccaataatgattgcaattccactaataccactgcttaaaactttgtgggggattaggaagagattaaaggaaagtgctgcaatgaaagaaccaaaattttcacttatctcaaaactttagaggtaattaaaataaaaagcatttgattaggttcaaaaactaataataggttatctgcttattggaagtaatttatgctatcacccattctaatagtaatgtttttaccttgacttaatattaaacaaaattaataattaatagaaatacctaaaaagtgtcttattaataccttttaggtataagtactagggaggaggaatgataaatggaattaagacacattcgatattttctggttcttgcagaggaactgaactttagtcgagctgcggaaaaattacatattgcccaaccacctcttagtaagcaaattaaagaattagaagaggaaattggtgctaaattatttaataggacaaaacggcatgtggagttaactaatgctgggcaggtatttctggataaagcttatcaaatccttgatcaagttgaacaagcatgcatcagcacaagattaacttctaccgggactgaaggtgaacttgtaataggattcagtggatcagtacaagatcttatccaaactattcaaagataccgggaaagatatcctaaagttggaatcgtattacaacaacttagtacacctattcaagttaaaaatttaattgaaaaaaaaattgatataggaattttagctgcaccaataagtagtagtaaaatacatgtaaggccagtcaaaaaggtgtcatttaaggctattattcctgaaaaacatcctcttgcgctcaaacaatcaatttatattcatgatttgcaaaatgaaccttttattatggcaactagatcagcggcgccattttattatgatacgtttatgaacctgtttcaaaatgttggtttcgcaccgaaaataaccgtccaggcaaatgatctacaaacggtttcagcattagtcgcaaatgggatgggggtagcattattaccttcatcaattaatccattaaatggattaatacaacggaaagttgaggatataaatactgaaattgaggcgtcacttgcttggcgaaaagacaataaatcggaaatattagaaaaatttttggggttatattttgaatttaataataatggtgatgagtttataaaataggtgatttttagatataattaagtttgtttttggtctaagtttaagctttacagactttatcattttagccaagaagactccttcctcaaggaacgcgaagtgagtaggtgggagatgaattggctttgaacaagggatggcaaggagccatcttaattgttcgacatacataaattgttacttcactatccatcgaatgtacgtttggtgtataatagtcatataccgaaatggaggtgaattaaatgataattaataaagcctataagtttcgtatctatccaaatcaagcacaagcaattctaattaacaaaacgataggttgttctcgttttgtattcaatcatttcctatccctatgggatcacgcatttaaagagacaggaaaaggtttgacatatggtacatgctctgccaagcttcctgccatgaagaaagagtttgtttggctaaaagaagtggacagtattgcgattcagtcgtctgttcgcaaccttgcggatgcgtatacacgctttttcaaaaaacaaacagcgccccgcgctttagatataagaagaataacgtacaatcgtataccacaaaacaaacaaatgaaaacattgccgttgtaggaaacaaaataaaattgccaaaactaggtcttgttcgatttgccaaaagtcgtgaaataacgggacgtattgtaaatgctacagttagacggaatccttctggcagatactttgtatcattgttagtcgaaacagaagtacaagaacttccgaaaacaagttcttacattggaatggatgtaggactaaaaaatttcgccattatgtcagatggaacaacttataaaaacccagaattttttcgagtattagaagagaaattggcgaaagcacagcgtgtcctttctagaagaatgaaaggatcttctcgttggaataaacaacgagtaaaggtagctagaattcatgaatacatatcaaactctagaaaagattacttggacaaaatttcaactgaaatcatcaaaaaccacgatgttatcggtatagaggatttgcaagtatcgaatatgttaaagaatcataagttagcaaaagcaattagtgaagtatcctggtcacagtttcgaaccatgttagaatacaaagcaaaatggtacggaaaacaagtcattgtcgtatcgaaaacatttgcttccagccaactatgttcttgttgtggatatcaaaataaagacgttaagaatctaaacctacgtacatgggtttgcccttcatgtcaaacacatcatgatagggatattaacgcaagtatcaatctaaagcatgaagcgataaggcttctaaccgcaaggactgcggagatagcctaatcaattagagttcgatagaaccctttacttaggaatcccccacttctaaacgaagtgaaagtggggatagttcaacttaaagaggtagtttgaaatcaagctacggttttcaaggatgtggagaaggtattttccacatccttatttttttggaataatttgtttttgtgtgttaaagagaggaacaggagagatttcttatggaaatttatatgaaaaatataggggaattgtgtattagttttgtacaataaaaaccgcaccaaatttgattgaagagggggatgtccgtattattgtggaaataatgggcgtcagtctactcatcttattattttgtttaacagttgcattcaaaagctatgcaattaattatattctcgctctgtttaaaaaagtaaaggtgtaatcagtccaatcttttgaatgaatttgtgcaaagagaaatggtcgtagtaaaagggatataacgaaaagtatcaacttgctaaaaatggacatgtaattgaaaaagttaattgcattattttatgaatatataattattataataattcgttttattgtaacatttaacagttaatcaggtgaaaaaacatggtaaaatttaactgtaagaaaatctaaattataaatgggggaagcgttatgaaagttattaaatcgaaatcattagtaaaacaatgtacaagtattgctttggcaggtgtaattggggttagtggtttaggtgctttcggatcaagtgtaagtgcggctgagaatataagtcatgtgaaggaaaaacaagtaactcaaaattatgacatatcaatattgcagttacaagacgctatacagcaaaaaaatgacccttttattaatcaagtcaaaatttttattaataagcattttcaggaatcagaatttttgtgggggaaagttagtaatccattaaaaaaagatatagtagatatacttacaggagataaaaaagattactctacaaaaattaacaaagccctaataaatcactttagagaagtaccatcattactaaaacaagcaactccaaaatttaaaagagaaatattacagttacttaattatttaccgagataaacgaaaaaaagttctactcaataggagtagaactttttttcgtttatcttcaggctgtggagaaagtcttctccacagcctgtttttgtgtctgaacctctttttatgatgggtgctttaaaaaatcatcgtgatgaacgtgtatctgtttctgtagaagagttggttccacaagatcatttccttcgtgcgattgaagcgacaattagttttgattttattgaagggaagttacgcccttattactgtgaaaacaatggacgtccgtcaatccatcctatcgttttatttaaaatgatgtttattggatattcttacggtattcgttcggagcgtcaattggaaaaagagattaaaacgaatatcgcctaccgttggtttttagggttttctctatcagatactattccagatcattctacaatcagttggaatcgtcgtactcgctttattcatacaaatattttctaagaaatttttgatgagattgtgaggcaagcgacagagtaccggatggtgggaggacgtgcgctgatgacagattctacgcacattaaggccaatgctaataaaaataagtttgtatataaatataaaaaagaaaaggaaaatttttacatagacgaactagaagctgcggtaattgaagatcgtgaggtacacgaaaaaaagaattaaaacccagaaaggaaagtgatactcccactaaaaaaactcgtataagtactacggatccagatagtggatttttaatgagagatggaaaaccgaacggttttcatttctttagaccatcgtacgactgatgcgaagtacaatattattacagatacttatttaacggctggaaatatggcagattccgagccatatttagcgcgtctacaagctcaaattgataaattcggatttaaagtggaagcagtagctcttgatgcaggctattttacagggtatatctgtaagaaattatcggagagaaatatatttatggtgatggggtatcaccgatttggaaaacgaaataaggaagtaccaaaaagccaatttaaatatgtagaagaaatgtgcatttgcttgtccgatggggtgtattttagagtatgcgacaacggatcgtgaaggatatcgtcactataaatccaacccagaagactgcgctgtttgtccgctacgtgaggtatgtttttcaaagaaacaaaaacaaaaagttatcactcatcatatatggtagaaatataaggatatcgttaaaaaaaacaaactaacagttacagggaaaaagttgtacaaagtacgctgttcaactatagagcgaagctttgcggacgccaaagaactacatggctatcgatatgctcgatttaggggctgaagtctgtccaaatgcaggcttatctcaccgcaacttgtcaaaacatgaaaaaaatagccctccatctgaccaaaaatggtctggtggagggctatttttttgaaactctattattttatgttgttttttcgtttatcttaatacacagaagaatctatattaaccaacatagaactaataacagataagagattataaatgctaacttaaatatgtacattaacgcttgaataaatatgtacattttcaattggattctccatactgactattatgtacctctactagcctattaaaatatttacctattgacacgtaataacatttatgaaatatgatatacaaaattttctaaaattaactattgacaatttggaaaatttattggaatttccaaaaggaaaagtgtgacaagatattccaagggtgctataataggaaatgagttgaaaacgaacacgcgttttatagatgttcggtttttgtaacataactgtaacataaaaacatttgcattactggtaactttcgggtaatattggtagcagagagggacaaacgggacaaatcgagacacgatacatactctctatacaagtgaaaagaaggtggtgcatatgtaatatgagtaaactactgactgcgcaagaggttgcagacttattgcgtgttcataaaaagactatccatagaatgatacattctggaaagttagacgcttctaaggtagcaaacaaattccttattaaagaggaagatgcaaaaggactattggaaaataaaaataaaatggacaattaataggaggaatattcaatggaaaacaatactaaacaattaaataatgaggttaacgaaatcgcggtagtggacgagcatgtaaatacaaatgacatcgtaacagtggacaaggtgtcaccttcaatctttgaagcggacggagcgaaggatgtattcttctcatctattcaaagtaaagatcgtaaatcagctatcaaagtttataatgctattaactctagtgagaatgctctagcagatcatagaggtgaagtattagaaatcacggacatggttgctcatgctattactctacaagatgaattgacaaaagaagatgtggatgcattacgtgttgttttaattgataagaacggtaaagcataccacgcggtgtcacaaggggtcgtatcatctattcaaaagattattagtattgtaggtccagcaccttggaacgagcctttagaaattgttccggcagaagtgaaaacacgtaaaggatttaaaacattaactcttcaactacaaggctaatttttgtaacaaatgaatgagggtgcacattgtgtatcctcttttttaaaacataaaaggatggtgcggtcgtgaacgctattaaaaacttagttcaagtatctattcggacaaatgaacgagaactggaatttgtctcttttaatggaatggtgcatttgaagcaaaagttagaagaagatgaaacatccgtcgtgttaacaaaagaagagttagacatggttgcagctatgtctaattttgataatgtgatagccaactttatgaactctattacagaaaagaaagccatgtaagccaaagacctgtgacctagttgttacgggtcacatggctttataagtaggtgatacaatggcaaataaacggttaaagaagaaattagaaacgaaacgtaaaaagtcgttacttgtttcagaaggttatagtaagaaagaaacaaagaagctgaaaggtagagagttagaaactgtttataaaaagaaagcgcataataggaaaaatagagagcgtgctagggaaatagcaaatctagcaagacagtggggactttcaccgagtaagtttaattcatggaaaaagttacttccggaaatagagagaataaaaaaagaacaagatagggaagcaccttttctagtaatatactatcaggactttacaggtgagacagacagtaagtttatatatgattttaaaaagagaaacaatacaagatcacgtagccaaattactaggtctataataggttggttgcagaacgcccagaacaaactatttttaggaagggttgctatgcggattgtcccaaaacgtgatgtatctaaaaccaatacactttggaagaatcacggctatgtaaagatatatgagggacaaggaaaagaacttacaaaactattaacagcaatagaaacgataatggttggtgtttacgacgtaaaagaccgtgacaagtatttaaagcagttattaaataatcttcgttccttaccatataaacaagcacataggaacgctaatgagattcagaagatatatgatactaaatcatatacgaaagaaagttgggataacgatgagtactactaatagaaaaaagcgtagagagattaaactctttacgctagatactgaaacacgtggtttggacggcgacgtgtttcgaattggactattcgatggaaaacaatactatactggctatacgtttgcagacgtattaccagtgtttgaaaagtacaaagcatatgactgtcatgtatatatacataacctagacttcgacctttccaagatcatagcagagttacgtgattatgctgaaccaacatttaataactcgctatttatcaatggtaatatagtaacgtttaccgcttctcatattatactacatgatagcttccgattgctaccgtcttcacttgaaaacttatgtagagatttcgaccttttagaaggtgggaagatggatattgtcgattatatggaagaaaataattacggtatttataatgtaaaaaaccgtaaattgaacaagcgacttacaaaaggtaatttctttacaacagtagataaagatgaccctgtcctatgtgagtacatggaatatgattgtcgtagtttatataaaatcttggaaattgtaataggcctatcaaaattagaagttgaacaatttattaattgtccgactacagcttccctagctaaaacagtttataaagaacagtataagaaggattataaagttgctatttctacaaaacaatataatcataaacaactaggaaaaggtttagaggcatttattagaaaaggctactatggaggaagaaccgaagtttttacaccaagaatagaaaacggataccactatgataaaaatagtttatatccatatgttatgaaaatggctgaaatgccagtcggatacccgaatgtactggataatgaagaagcagaactttcttttgatctatggaaaagaagaagatatggagcaggctttatacatgcgaaggtacatgtacccgaagatatgtatattcctatcttacctaaaaaagactatacaggtaaattgattttcccagttggtaaaatagaaggtgtttggacatttccggaactagctttagcagaagcggaaggttgcaaaatagaaaaaatcgaaagcggtgttgtatttgagaaaacagcacctgtctttcgtgaatttatttcgtattttgaggaaataaaaaatacaagtaaaggtgctaaacgagccttttcaaaacttatgcagaatgcgttgtatggaaaatttgcaatgcagcgggaacgaatcatgtatgctgatatttctgagagagataaacttgaagcagaaggacatacagtaagcgagatcatatatgatatgaatggaattcgaatggaatttttagagtatgacggatatgctatggctgaatatattcaaccacatatttcagcatatattacttctattgcaagaattctactatttaaaggattgaagtatgcgcatgaaaaaggaattttggcttattgtgatacggacagttgtgcaacaactacgaaatttcctgataaaatggttcacgataaagagtatggaaagtggaagttagaagggtatgttattgaaggactctatttccaaccaaaaatgtatgcggaaaaagctattaataccgatggtgaatatgaggaagtattacgaatgaaaggtgttccgaaatgggttgtagaggaacaactagactacaattcatttcgtaaatggtatttacaagtaaaacgtgggaaagccgaaattcctatttataaaggcggggaacgtgttcaaaaattcttgacgaaatctaaaaataatatagaaatgaacgaactagcggaaatgcataaaacaattaattttgctagggaacaaaaaagaaacattgatctaaataaaaatattacctcacctctagttcgtaatgactatggggaaaataaggacgaaaagtcagagtatgagtttgacgaatggtatgaaagattagaagagtttaacgatgatatgaatgcggtagaggaactttgtatgaagtttggaaagatacaaataccagagaaaaagcaaaggaagttatacggactttataaagagtattcttcaaaagcgaaagctatgtgtttttcaaatgagggacttccgattcaagattggtgtaaaaagacaggatgggacatgaaagaactattaggcgaattaagtttcttataatagggagtgacgaaaaatgttgacgccaagggaacaggatacgttagaatgtataagcgggtatatggaagagtttgggtttgcaccgagtgtgcgagatatggcgagtcgaatgtacgtaagtcataagacagcacatcgctatttaatgcaattggaaagtaaaggacgaattaggagagtgcatcaaagacctagagccatccagttgttataaggaggggaaaggtatgcgtgacaaattgctcgactttatcatcgaactatcacaatctagcaaacaagtcgtaagcaagtcgtatgtcatcgacaggttaatgcaagtaacaaaagaagactacaaggaactagaaaagaaaacagaaaatgcggaaaaggactagcaaagttgctagtcttttttatttgtccaaaatgacacacgtgtgacgttatgcggaacaattgttcgtattatagtatacatatacagaacaaacattcgataaggagtgtgacagatggattgtaagacgttagtaaagcgatatgaagaacaaaatgaagaactacgaaaattaaattctattcttacaaaacgaatctatcatttgctacaagaaaatgaatcattaacaagtcatgtatcgtttatgagagatttcaatgaagaattaatacgcgacaacatgaattatttaggcgataaactagatgaaaaattacaagatatagaaggagatgattcaaatgacagacatgctaaaagcaattgaagaaaacccctttctattacgattcggtgacggacaattcttcgcgcgtaagaaaaacgaggaagaagaggaagagatcgaagaggttgaggaagaggaagaagaggaagaagaaaagccgaaaccaaaacgtaaaccaaaatcaaaaagcgaggaggaagcaccagcatgggcacaaaagctgatagacctagtaacaccgaaagtggaggaacaacagggaacgcaaaaagtaccggtaccaccgaagccaaaagtagaggaagacgaggagccggaagtggaggaagtggaggaaacggacaagccgaagaaacagggcttcctaagttggttcctgtagacgttcctggtaaagaagtggaactgtctggagaggaaaagaagctagaagagaagcgcaaaaaggacagggaacgaaaagcccgttcgcgcgcgaatacaaaatcttccccacgatctagcgggaaatcaaaagcaccgtcaatggaaatcttgcaattgaaaccaattctaatgacagtgtcacaaatggtggctacccgtgaagggtttgaaatatgggctttaagtgaaacagaaattaatacgctatgtgaaccgatagagaatatgttagcaaaaaccgcagcactcgaaaaagtcggggaaaatagtgacgcgattgcacttgctatcgcatgctttacaatctttgtaccaaaattcttaatgtggaatgccacaagaaaacagaagaaagcgcaggtggtaacaaattatgctaaatcaattcagcctaccggaaacaccggggcaaacaaaacaggaacgactggagcaagtagcggaccaagtgttggaaaaccttccacttccagtcaagcttttagcggggaactcaatcaactcattccggcaagcgctccattttgaggactttgacgaacaaatcgacaatggacttgaaaagctgaaagaagtgattgactatgtccaatacggtacttatccgggcgagtaggtgtatctattctattccgcttgatgattggcgtacaaattggtgtccgtgcttaccaaaactggacgagtggtttgtaacgattggtgagaaatatgtggtctttgaatacggcgatatctgtcaccgtatggacgagcattattttaacacgttactaccacgtatcccctattcgtcacgatttaaggcgttacgaaatggaaaaggtgtattgcgcacggaaaggagttacagcaagaagggaatgaagaaacatgcaagcaatcccgactgaccaacatgtttttatagctggtaaaacaggtagcggaaaatcgtttcttgctgaggtttacctagccgggtacgaccatgtgattatgttagatacgaaaggacagtcacttgagagacggaagaaaggcgagaacctatggtatgggttaaaggaagggaaagactttgtactggtcgagacactggaagaagtagccgaagcccgcacgaaaaaggtaatttattgtccgattccggaagagcaagatgaagagtattatgacgcgcttatgaaatgggtgtatgagcgacataacacaattttatggatagacgagttaatgcaagtttgtccaagtccaagtaagtatccgtatcatatgaaacacctctatcagcgaggacgctttgtggattccgtcgtatgggcatgtacacaaagacctgcaacgattccatcggatattatgtccaactctacacacttctttatttttgatttgaataaagtggcggatagaaagcgtgttgccgatgatttggggtctgatatgtttatggacaaaccgggttatcgtaatttctggtacatgcgggatagtgacgacgaacctgtccgcgccactttgaaactttgaaagggggtgacaatgtggagggtaaatttgcaggggtcggactgaaaaatattattgtcctatggctcatgtttatcttattaacagtcatggcgaaagcgattttaacaaaacatccggtgaaaggactaagtgaagttgtccaagccgtataggaggtgtgacatgcatttattagaagttattgttccgacggctatgtcgtcatttgctctagggattatagtaggagcgaacatcatgaattgcaatggatttaagaaaaagtaagaaaaaggaggaaaagaaaaatgggaaaactatttagcccgtcatggtgggtatctatgtttatcaacacatttgtgacaatgattttcatttatttaattaaaaaaggttctgataagtataatattccggttgtaagaccgattgcggaggcggtataacatgcatgtagttactatttatgatggaaatatgaatcgtattaatacacatttcacaggaacgaaaccgacatttgaacagctagctaattttaaaagtcgttatgaaaatgcggaatatgtggaatcaaatgaacgttttgctgactttgaaattcgtgaaggcgaacgaaaagaacgtttagcgaatgaagcaaagcaagcggaactggaacgaatcaaacgtgaacaaggcgcgggaagcggacttgttgaaggaggaacaaactaatggcacaacagaaagagcaatattcaccgcaacaacgcgcaatgatctgggcgacgtcaacacgacaatacaaacaaacattaccaacgcaagttgttacacaagaaggtatgacgcttgatttcacattaccgaaagcgcgtctattaacaaaaatcatgctacatgtaaaagccgtagccacgttgaaaagctctagcgggaacattcaacgcgacccaatgtctccatatggtattttacgccgagtagaactcaacttaaataacggcttcagtccttatattgtatcagggaaagaactgtttatgtataacgttttacgtaatcatccggacgtattgttaccaggtgcgaataaacaatacttaaactatgtggaaaacgtagcaacaacagccgggaaggacaatgaaattcaatttacaatcccaatccctgttagtttaaatgaacgtgacccggtcggaatggttatgctgcaaaacaacacggctaacgtaaacttatcaattgccgttgaccaattagcaaatgcatataaattaaatccatcaaataatgaccaagtcatatttaaatctatgtccattacaccagagatcgaaacattctctattccgtcgattccgggcgggcaaccggatatgtctgtactgaaactcgtacaatcgaaatcggacattttcagtggcggtggacaaaacattttaaaactaaacgtagggacgatttatcgtaaactcatactctacatcgaagacttaaacgggaaaccattagagccaaaagacttcacgggtaatatggaacttgtctttaaccaagcggacacgccttataatatcaagccggaaatactcgtacacgaaagtcatagtaatctaggctatccacttccaccgggtatgtattgctttgacttctcattccaaggtgtaccaaacctcggagggtcacgcgactatgtggatacggagcgtttaacagaattctggttccgcttcagcacgcaagtaggcgggaaagtcactgtcgtatcggaaacaatatcacgactacaaatgtaaggggctttatgctccttacctatttataaggagggaacagaatgggactgaatcatttctatcacgatctatacccggatacgggtttcaatacgacaagtggaatcaccgtagcggaaatgggtgaccaagttgtattagtggatgaaaaggacatcaagacagatgtgaaaccgaagtccgacccagtgacaggtgcaagcatttggaagtccattggtttattcatcattatcataatcgcattcggttatgtggcggggaggttgtaagtcatgaatgagattgctcaattcattagtcaagtgggattcccgattttcacggctatttttatgatgacaaaacaatcaaaggatacacaagctatgacgggtgcgttaactgatttaaagatagcaattgaaaagaatggtggcggtaagcatgagtaaatcattaatcctagttgttgccattcttgctttatggttctttgtaattcgaaagaaaaaggcgtgatgacatgtgaacaacgacgcgaaaggtttaacgtttctcactctatcccttttatttttatggctcgtgtttgacgactttgtcggaaagaaacgtctatcaaaattggcgcaaatgatgacgccggacttatcaatgcctagcccgggggaagttgctgagaaagtggtggacggtgcgaaagagtctgtaaaagaaacaacaaagaatacaagggaagcgcaaaaagaagcggataaaaaagcgggtgaaattctgtttgaaaaacctgcaaagaatgaaaaagaccccaaaaagaaagaagtgttagaacgtctttccgaacagagcaagaaacgtgccgaaacgaacgcgtataaagataaggggtggctcggatacagttgggaggacttattcgaggatacgtggggtacggtgaaagggtggtttaaatgaaagaatttacggagtcaatgccattcgtcatcttctttatgtccgtgaccgtcctattgcaatcctttacgaacgagcgtgtaacaaatggatttttgctactcgtattaatgagtatggttgttacaaattcggacaagtttataaaactattaaatgaggtgagagtatgacaaaagtattcgacatgatcgcgggaattggaatgctcattggtatttatttgttcctttcaaatggtcgagaaacagtgtcaatcattgaagcgatgggtaaaaactcaattgcgggcattaaaacattacaaggacgataggagggttttatatggattacaagcgcgacaatttaaatcgtcacgcgttccaagcgttggacaagcccgtatatgaaccctctatcagattgaacgtggagtttgacgagtacctcggctcttatgcgttactggtgaagcatacagcaaagcagccaaaaatggttgtggctgacccggtaaaagaaccgtgggagaaaacacgaccaaacttgcaaaacgaacaaatccgaagagaggatttcccgcaaggctactatttcgggaatcccattatgggggtgtagggaatgccagaatttgaaagactcgaccctcctgcaagcggtgggagtggcggaaaacataaaccgaagtttgacaaaaaacaaaagatgctattactaggaggcggaattgccgtcgtcctagtggctctttttatgaataaggcaaagcatagcggtggttcatcgcaagaagccgtagaggaagaattgaaggactactatacaaactatccaacgctcggtagtcaaaatgctgttgtgcaagatggaatgaacacgcttgtcgggcgacaagaagaattgcttaattccattttagaactgcaagggaagaaagaccctgctgaactaacaaagatttatgtcacattcgataacagtgatgaagcgttaaaacgtcaacaatatttaattaattctggagcaagtacgacatatgtcagaaaacaattcattaaagatggatgggcgggcgcgaaggattactatgttgtggaagcatacggaaaagaccgtcaagaaatggctgaccttgtgaaaaaaggtgtccaagacaaacaatggggcggaatggaagtcgggaaagtgaagaccggggacgcaccaagctatggcgcacattctaggagttattaattaatggctctagatgttagaccattcataaacgacgcccaacgaatccaaaaagaaactggaatccctgcttctattattctcggtcaaatggtgtttgaatctagcggaaagaatcccggcggaatgtccggtcttgcctataatgctaagaatctatttggcattaaaggtgtcggacctgccggaacacatactgtatggtcacaagagtatgacgcgggcggtggtcgtgtttctggattccggaaatataacagctactatgagtcgatggctgaccatgctcggttgctgcaaacaccgcgctatgcgtcccaactaaaaaatgcgaagacatttgaggactttgcgcgcgggattaaggcgggcggatacgcgactgaccccaactatgcgggacaattgatatctattattaagcaaaacggattagacaagtatgacgacgggacgccatacaccggagagggaagcgttcctgccggtggagggagtgataaacgtggaatattcacaagtgtcgctaatggagtcattcgcgccttgcttatcttattggcttttgtggtttgtgttctcttttttgccaaggcattcccacaagtggaagctacggcaaagagcggagcaaagaaagttacaaagtcatcctcacgatctagaggatataaaaaagtaaaaccgaaaggcggtgctacgaatggcggaactacagggactcaaactaaacgacaagttgaagcaagtatatgacaagacgttatcccttggtttgcgattcacaagcggataccgccccggttctaccggaccaagcgggagaccggatagccattcccaaggcatggctatggacttcgcgggttcgaaagataaaatggacgaatttgcgaaatgggcgaaaacgtcaccgctatttacggaagtgttatggcaaactgctggacactacgatcatgtacacgtcgggtggcaagagggaaaacaccaagccggaaagatgtacgtaggcgataaaacattgatcgacaggcccacgggtgacggtggcggtgccctaagcacggggacggcttccccaaattccgacaaaggatttatcacaagtgcatttgttggaatcgttcgtgctgttatgattcttgtctttctgatcgtagctgtatatttcttcttccaagcattcccggatataaaagtaaaagtattttaaggagttgaaaaacatgttaaaggataatacatggcgtgaggtcacgctcacactaccgcctaaaatggcgtatacacatcatttcattgatacaaacccaaaccattatgacattaacaatctatctgtagcgacgctatacgcgggcgttcgtgtcctaccaagtccaagagaatacgaattacttgtaccgggtaatggacgaaacattttagcaaggaaagaaggttcttcccaaatccaaatttataacgatagtgcggatgctgcaagaatcattttaacatcgtttaacgaaccgtttaaccctgctgtactagcaaatagcggaagtgttgccccgatttcaaacggtggcggtggggtaagtgataccgtcacggtaaaaggatttacaagcgcgttacctgctgggaataacaatataggtaaagtagttgtcacggaaatgcctaccattccaattgagtttaaaacattaccatcgggtacaaatatgattggtaacgtaggtgtcacgaaactaccgccacttgctgaaggtgaaagtcatatcggaagtgtgaatgtacaaggtggggtttcgatttccagtatgccacctgtacaggttacgaatgacccggtgcgagcaagtcacttctatttcgaagcaatgatcgggacagggaactatgtatgcaatgtaggtgacgtcattaaattctcgtacttagtgaatgaaggtgacaccgatctattcctaaactttgatgataatacattaaatccaaatttattatccggtaagaatgtaaccattcgtttgaaacccggtgaacaattatcagagtttacgagaaaagcaaataaaataacatttgtgcgccaatccggaaatggaatggttcggctgttaggggtgtaatagatggggcttgttaaaccatttccagttatagaaacaaaaacaaagaggataccgcaaacgagcgaaagacctctttattatagggttgctagaatccaatcaagaaacccagttgatagcgcggaagggtctgttcttcaaggacaacttttcccgcaaagtaactttggattcacgggtacaacgcaaccgttatacaccttttcatttggtgttcgaaacggcgggcccgcttcacttatcaaaccatccctactaaaagtaggagattcccgcgaagatagttaccgttttgaaatatacaaagacggggaagggtttcatgttctttatcttgttctatctccctattcaaagggtggtgtattcgtctatcatgcaattgaatgtaaagagtattttgaggtggacacggagtttaccgaacgtggatatacccttgtttggtcaagtgtaacaggtgatacacaaggcgtatatgaaggcgggcgaagactattaacggaaagcaaagccgaagaactctatttgaaaaagaatacaattggattccgtcaagtggcactagaccccgcgacaggtttttaccatcgtggtgacgggttactttataccaagcgaggggacattgtaacactattcggtgacctgctacatggtaacggtggtgcttataaaatcgtgggacgtgtaccgaaagagtttgccccgttatacgaaacagttatacaggctatgtattcgaaagctgattccacatatggaagtatgacaatgatcgtagaccaagccggacaaattatacaaatggaaaatagggtgaatggtgacccgaacgcaacaaataccaaaatcagtggcacatggcaatgtgcatattaaagggaggaaaattagaatgggacaattaaaaacttttcacgctgggcataactactttgtgacaggagcacatgcaaatgggtacaaggaggaagtcgaaacaagacgagtcgtgcaaagaatcgctgaattatgcgaagagaacggaattcactatgcaatcactacagacaacgacggacgcacacaacgccagaatttaaacaacatcatagcgaattgtaacagccatacaagagatcgtgtggacgtagcgattcacttcaaccaagcaacgtcagaaaaaggcggtgtcgaggtttggtattatgaccaatataatttagcttctaaagtgagcgaagccgtggcgggtgcgctaggtatcgcaaaccgtggagcgaagcaagggaaggaattagcggttctgaatgggacaaatgctcccgctattttaatagaggttgcattcttaaacaatccggggaatatgaaagcgtacgaggaacgatttgaagccgtttgccgcgctattgtccaaagtgttacagatgtaaatctgaagaactatcaggacttacctgtcgcaaaagcggacaaatattaccgtgtgaacttcggtgactttgacagctttgattggttagcgggtgtaaagaaacgtgtaaacgaaatattaccgggtcacggatgttggattgcttgtctagccgggaacgctcatagaatcctattaggtgactatggaagccgagaggaagcacaagccgtaattgatagattgaatcaagaatttccgggtagtggaatttggttagaagaattgtaaaataggaaagagttgtggaattgattccatgactctttttttgcgtattttgaatgatttcattagaatttgtaaaaataaaaaaattgataacgaaagtgacgcatgatataatcaagttgtcaaaaacattattttttcaacttaatataaacaaagttttaaccgttcaagattttgtttatattaagtactaagggaaaataaacgtctgctaacgtttgtttttattaacccttaacacgttaaacgtgtccgctttaagttataggtttttatttttgattttcaataagtttcgcatcgaaacttacactttatcgtcttataaagtgactttttcttcttctttgactcgctaatagcgagtctttttttatgtttaaatataaacaaaaagcggacaactgctattgtccgctttaagctataggttctatatttttgattttcaataaatcacgcatcttttcaattccataatcccttgcgttgtgaccgccattactaccctctttcatcgtaaacttatcgaaagagaataaatcaatattttcttttatttgcttttgcaaagctgataatatttctcttttgtttctatcgcattttcttttttgttgtaatcgattttcttttttagctttctttagttctgatatctttggtatctttagtaattctctagccgtctttttacgattatcaaaggtttcccattcaaaactatcattaaaaccaccgcattccattgaaatatctacaggtgaagtttcaaacaacctatcttttgccgtttctaaacttaattcaatttcttcatttagatgtttataatacgatctctttggctttaaagaaaaactatcaaatattaaaggtaactctttatgtctctttattcctaaatgcctaaaatcagctaaatcttcaacgatgtgaaaataatttatgatttctaatttccctaattttaaaccgtattctcctgctcttttaccatacttaaagaaatgcgattcaggtttatctatgaagtgttctaacttcttcataagataagattcgttttcgaactctttatcaaatgtttggtaaccagaagttttaacttcccatttatcattaagtaatttgtactcatatactgctgtatttaaaaataatccttcggtaaactcttcaggttcttcaaaaatccctaaaactttagagcctttaggactccacccatttacattaagcatttcaaattcacttaaaatactatcaaaacaattatctaaataatcataagccggtctatttgaatctggtgtttcgaatttaacgcaatctgttaaaattgaaataactctaccaccattcttttctatattcaaagcaccttcttgaactcttattcttccgaatgctgttatcatagaagaaacaattggattaaacatatatcctacatcaaaacccgcaaaatatatttcctgttcaccatcttcgttttccgaacaagcgtattgttggaaagcttgaaagaactttccataaattgcattcatgattaatttaacaatatattccgaatgcttcccttcactccttaattttaaacgaatttcccaaagggtatcaatcactttactgattggatgtaattttcctgtcgtttcaataacaataacctctataatttctttaataacttctttccttttctctggttcgatttgagataaaagaaattctatttctttataatgagctgaagctataaagttaccaaatcctaaaacattccttctgatttgatttactgttccttcgtcacctttttgtttaatcataatagtatgtctaacattaggtggtatttcaaattcacatgtaagcataactacacgattcaaactaggtttagggacttcattaaaatctttaatattatcaaaagattgaactgtactatcctttaaatcagggatgcaatacctcataacagccggataactagaacttatatcagtgttagctccgtttgatatataaccaactttttcatgttcaataattgcaccttgatttgcatcaaaacttatattaatagcttttgcgattgtttcaacatcaacttctttttcttgccaattttctatagtagaatcaattgaaaaattctttaactctttttcatttaaaactttatctataacagcttctgctaatgttcctgctgaataaaatgaatttgggtaacaatcaaagctttctttaaacatcttagtcacaacttgaattaaatctttcgctaaaaaggaattgtacatattgattcttaaaactttcttcacataagtattatcttgtaatctgtggttatttttatctacttccctattataacctttagaaaaaatatcccagtttatatgttgttcttttatttcctctacatatttaagatttgcatttctagcacattcaataggtgtcttttgccaaaaaggtttagaccgaaatgtgtgacatgtatttatcttgcctccctttgtcacaaataactccaaactaccattcaacactttagaaacaccgatactttcaccattaccgatatctaattcaataatagggggttctgtccacgtcccactctttttatgaaactttccgtttatacccttcaaaactctctgaaatgtcgttacttgttcgtcttgagataattttttacattccattaacaacttcagaataagaatggattcaatttcgtcaaagtgacaaatgatcttgttgttaaaatgacaatctttaatgatgctctttaacatgttgatgattgtaaaatccatatctttttcattttctctataaatataatgataaccattcttcttagttataggattgtacgagcaaaaaccaaataacataatttttccggactcttcatcaacttcaaatttaaatccgtataaacccttttgtttatctgaatataaataatctgatggtttcggacttgaaaaagtatgtacattggaaagatgaacttccatctctgcatattcaagcttgtccaatccttcaactcctaaaaatgaaggattcgttttcttcatttacaaaacttacctccttctcgaaaaaatattttacaaggacaattatagcacataaaagataaaatcacggcatataattccaatagattgaaagaaaataataaaaaagataaatatattaattaaatctaagaaaccaaatatgaaatatgtcacaaaaatgagaataataggatgtgaccactcgcatggtagttatactataaaaatatttcccggattaaatggaattggggtaaatcgaacaaagtgagattcgtaatctttattatgcaacgaagtgaaataataatagattaccctaccgttgtagacgcgttgacgaccacagggaggaaaggtggcggacaagaggctaggaaggatcaaactctccaataaagttagtttgtctagcatctaaaataaaaattgacgtttcacgttgtttgtttcgttcagttttcaaagaactacttggtcgctcatttgcgacttccttatgttaacatcttcgtttttcgatgtcaactaagtttttcaatttcttttttgtcgttttctgcgtttccgcatcagcgacggttattaatatatcatggtgaaaaatgaaatgcaacaccttttataaactttttttaaaactgcccacatttctttttttatatcatatacttaaacgaaatatctctttcatgtatgagcaattcctacatatattttatataaagttactctatcaaaagacgtttctttctataataagcgttttattcatatagcatatcatacaaggaggaatatatatggactataccgatttattaatcaaactaggtctctcggctattttaggatttgccattggtttagaacgcgaattaaaacggaaaccacttggtttaaaaacgtgtttagttatttctattattagttgcctcctaacgattgtttctattaaagcagcttataacttaccacataccgatcatatgaatatggatccacttcgacttgccgctcaaattgtatcaggaattggttttttaggtgctggcgtaattttaagaagaggcaacgatagcattgcagggctcacgactgccgctatgatctggggtgcttctggtattggtattgctgttggggccggattctatattgaagcgatattcggaatgtgtttccttatgattagtgtcgaacttataccactcgcaatgaaatatgtaggccctagatcatttcgtcaacgtgatatcgctgtgaaacttgttgtacgaaatatggacaatatcccaatcgtaattgaagaaataaaagaaatggatataaaagttaagaatatgaagcttaaaacattagaaaacggttctcactatttacatcttaaactgtccattgatcaaaaaagacataccgctgatgtttactatgctctccagcatcttgaaagtgtccaacaaactgaagtggaaagtatgtaacgtaaaacaaactctctttaattagagagtttttcttttttctataatggcaacaatgaatgtagtcctacaaagtaaggaggaataggcaattgaaatcccgtccgaatttagtagatacatttcgtgattccattatttttcgtttaatttgttttattattgtactgactgctttttccggttttcttatacatagattagaaccttttcatttcactacatggtttgacggaatttggtggtcaatcgttaccatttttacagttggatatggcgactttgctccccatacgacgataggaaaactaataggtataagtattattttattaggaactggcttttgttcttattatatggtgctgtttgctaccgagatgattagtaaacaatatatgaaaattaaaggtgaagaagccgctacttctaacggtcatatgattatcgttggctggaatgagcgcgcaaaacatgttgtaaagcaaatgcacgtattacaaccaaaccttgatatcgttttaattgatgaaacactttctttacttccaaaaccatttcatcatttagaatttataaaaggttgtccgcatcacgatcaaactttattaaaggctaatattgcaacggcacacaccatattaataacagcggataaagaaaaaaatgaaagcttagcggatacacagtccattttaaatattttaactgcaaaagggctcaacccaaacattcactgcatcgctgaacttcttacttctgaacaaatacaaaatgcaacgagagctggcgcgtcagaaattatagaaggaaataaattaacgagctatgtatttaccgcttctcttttattcccttccatttcaggtgtactattttcactttacgacgaaatctctgataataaattacaactgatgaagcttccatcgtcctgcaccggacaaacttttgccaattgtagctatactcttttaaagcaaaacattctcttactaggtataaagcgcgacgaacaatatatgattaatccagttcattcctttgttctcattgaaagcgacatactcattgttattcaccattagtaaaatgacgctctaattcttgcatgagcactttcccaatattgatatattttcttttcacatctccatctggatctttcggctcagcaaattgatccattccacttgttccagctgttaaagtattcacattatcatctagttcgtcttgatatacgtgcgaaagaatatacggcgttccaagacgaactattacgcctggtacatctagttctccatcaatggctgtaaatggcactcgtaaaaattgatacccatcttcttcatcgattttgtaatcgaagcatcctttatcataatcccaattaccaccaatgctatatccaagtggtttcataatctcttctaatttatataacgcatatgtacgtccttctaaatttgattgaatcggaatcaagcccatccctcctagacttttcctttagcatacccactttagtttgaatatactgatggacttttcgataaaataataaaaagcgaccggaatccggtcgctttttattattttaaacgctcttctaattctgcttttaattcttcaaatcctggtttaccaagtaaagcaaacatgtttttcttatatgcttctactccaggttggtcaaatggattcacgcctaataagtagccgctcatcgcacatgctttttcgaagaagtatacaaggtaaccgaatgtgtactcatttaattcaggaatattgacgattaagtttggtactcccccgtcgctatgtgcaagtaatgtaccttcgtatgcttttgtgtttacgaagtctacagtttcaccagcaaggtagtttaatccgtctaaatcgttttcttctgattcgattgttagttcatgtgtagatttgcctactttaaggactgtttcaaataagtcacgacgaccttcttgaacgtattgacctaatgagtgtaaatcagttgagaagtttgctgaagatgggaaaatacctttttgatcttttccttcactttcaccaaataactgtttccaccactcagcgaagtattgaagtgctggttcatagttaacaagcatttcaattgtttttcctttattgtataaagcgttacgaactactgcatattggtaagctggattttcttctagttctgatgttccgaagtcatcacgaccagcagctgcacctttcatcatctcttcaatatttaagccacttactgcgattggtaataaaccaactggcgttaatacagagaaacgacctccaacatcatctggaataacaaatgtttcgtaaccttcgttatcagctaatgtttttaatgcaccacgcgctttatctgtagttgcataaatacgtttgcgagcttcttcttttccatacttttcttctaataacttacggaagatacggaatgctagtgctggctctgttgttgtacctgatttggaaataacgttaatagagaagtctttaccttctaatacgtccattaaatctttcatgtaagtggagctaatgttttgtccaacaaatagcacttgtggagttttacgttgttctttagaaagcgtgttgtagaaagaatggtttaacatttcgattgctgcacgtgctcctaagtaagaaccaccgatacctacaacaagtaaaatgtcagagtcatttttaattttttctgcgcatttttgaatgcgagcaaattcttctttgtcatattgaagcggaaggtctacccacccaaggaaatcgttcccagctccagttttttcgtggattgcgtgatgtgttactttcactgcatcacgtaaataagtgatttcatgttcaccgatgaaggataacgctttagaatagtcgaacgttacatgtgtactcatctttttccctccaattatggatatgtatttctgtattcactttagcgaaactgaagttgtaaatcaagcgattcaaacattgtaaacgtaaccaatatatattttttagaaaaagttcattttttgcataaaaattcgcatttttcggtatagatgtatatacatcttctttcaaacattttttatgtataaaaacaacataactaccccattctataaaagagttaattaactcatcgcttgctcatgcttcacaattaaggggggctttttcatgagtactttacaacgtatcgcattagtctttactgtaattggcgctgtgaactggggactaatcgggtttttccagtttgacttagtagcagccattttcggtggacaaaattcagctcttgcacgtattatttacggcatcgttggtatatctgggcttatcaaccttggtttactgtttaaaccatctgaaaatcttggtacgcacccagaaacaaacgaaattcgataatcagtatgtcctttcacctccgacatacgaatatgattgcatgcaatcatatttgcaaatatatatcataagataaagtaaaagaggaacgctcatatgcgttcctcttttactttgttaactcggactcttcaatccattctgccaacttttctcgcagcgtattaaatccgttttcagatgggttcggtataagaatccttccttgttttcttttcgccgcttttaacgataaactcatttttctgtgctcttcatcaattgaaagtacctttacttctactgtatcgccgacctttaaaaagtcatgaatatcctttacatatccatttgtaatttcagatatatgcacaagcccttgtgtttctgcatctaacgctacaaacgcaccgtaatcttgaattccagtcactttccctgttacaaccactcctgttgtatattgttctgacatatgaaacactcccatacgtttaccattctctctacaattatagagagcaaagcagatatatttattttaaatatccgattggttagtacgcattctagataacgttatctagaatgcgtataccttatattagtaaattataccactatgacagaactcattcaaaattcatgaaaaatttcccttaaagaagtataattatccaatattgggatagactactaacacatggctttctagtattcccccccttttatggacaaaacgtattacgttttgtcctttttttattctctacaaaccgttccattctcttcattgcttccataagttgttcaagcgatgttgcataagaacaacgaataaaaccttcaccactttcgccaaatacggtaccagggacaacagccactttttcttccagcaataactgttctgcaaattccgctgaagataatcctgttgaagatatagaagggaaaacataaaatgctccgcctggcacatgacacgttaagcccatttcattgaaagatttcgtcatgaagttacgacgcttcttataactatctctcattcgaatcacttcatcgttccctgcgcgtaacgcctcaagtgctgcaaactgagacatcgtcggtgcacacatcattgaatactgatggattttgagcattaattctgaaaattgaacaggagctgcaatcataccgagacgccatcctgtcatcgcaaacccttttgaaaatcccgaaattaaaatcgtatgctcacgcatatttttaatactcgcgaaacttgtatatacttcgtcgtatacaagctctgcataaatttcatcagataatacaattagattgtacttctcaacaatcactgctatttcttcaagctcggatttatttagcattgcacctgtcgggttatttggtgaacaaagcaaaatcgcctttgttttcgctgtaataactgcttcaatctgttctggtagtactttaaactcgttttctaaagtagtcgccacaggaaccggaactcctccagctaatgtcacaagtggtgcataagaaacgaagcttggttcaataatgagcacttcatcatcaggatttataatggcgcgcatcgctacatctaacgcctggctcgctccaactgtaacaatgatttcatcacttgggtcataagatactgcaaattgtttttttagatactttgctatttcttgacggagctctaataatcctgcatttgctgtatatgacgtatacccttgttccaaagaacgaatacatgcttgccttacattccaaggggtaacaaaatctggctctcctaccccgagggagataacacctttcatatttgctgctaaatcaaaaaattttcgaataccagatggttttaaagattctgctgatctagatagttcaaattgcttcatggtgtcaccacaattcgcttatcatcatcgtctttttcataaataacaccctcatgtttatacttcttcaaaatgaaatgagtagttgtagaaacgacagattcaattgttgctaatttctcagaaacaaacatcgctacttcccccatcgttttcccttctaatgtaatagaaagatcatatgtccctgacattaaataaacggatttcacttctgaataacgataaatttgctcagcaaccgcatcaaatccaacgccatgctttggcgtaactttcacatcgatcattgccgttaaacctgtatgttctttcactttcgtccaatcgatatgtgttacataatccacaataatcttttcattttctaatctcgcaaccatcttctttacttcttctacttctatatttaacagcttcgctaatgtatctacagataatcgactactcttttcaagacaagctaataattctaattctttttctgtcaccatataaatcatccttccttttcgtttgtgtctaaattatacaaataccctttcaagtttgaaaagaagatttttctattgaattatgtcaaaataaagtgaaactttaatcagcggaaaaatgcgggataaagcgaaaggggatggaaccgtgaaaccaaaagtttatattgctgaaccagttccaacatttgtagaaaactatttatcagaacactgtgattatgaaaaatgggatcaaaatgagaaagtacctcgtgatattctattagagaaaatacaagataaagatgggttattaaatttcggatctgctattaatgaagaattactgacagtagctcctaacttaaaagtagtgagcaacatttctgtcggttacgataattttgatttacaagcgatgaaaaaccgaaatgttatcggaacaaatacaccatacgtattagatgatacagtagctgatctcgttttcgcccttatgctatcagctgggcgccgcgtttgcgaactcgattcttacgtgaaaaatggtgaatggaacgctgaaatcggaaaagaacacttcggactagatgtacaccatagcacaattggtattatcggtatgggccgaattggagaagccgttgcaaaacgagcaaaattcggatttgatatgaatgttctttactataaccgccgtcgtaaagaagaagctgaacaaaaattcgatgctacatattgtgatttacagacgctactgaatcagtctgactttattgttcttcttactccattaacagatgaaacatatcaccttatcggagaaaaggaattttcattaatgaaagacacagcaatcttcattaatgcttctcgcggcaaaacagtagatgaaaaagcgttaatccatgctttaacagaaaagaaaatctttgcagcaggtatcgatacatttacacaagagccgattcaaaaagataatccactcttatcattacaaaatgttgtgactttaccacatatcggatctgcaacattaaaaactcgtcagcaaatggccatgaccgccgctgaaaatttagttgcagggttacaaggaaaaacaccgcctaatattgttcgcgggtaatactgaataaacgaaaggcaagatgacatcgtcatcttgcctttttttgttaacatattttcttcttccttggagatgatatgaacaaaaatcaatggagtgacaaaaaatgaatcataaatatacttgtccttatttcactttttccactcgcggcactactgttcattacgaattgtatgaacatgataataaaacagaacgtcctactttcatactcgttcacggctttttatcttcctcattcagttaccgccgtctaattcctttactatcgaaggaaggaacagtcattgctcttgatttgccaccgttcggaaaaagtgataagtctcatctgtttaagtattcttatcacaatttagcaacgattattattgatttaattgaacatttatctctctcaaacattgtattagttgggcattctatgggtgggcaaatttctctctatgtaaaccgtatacgtcctgaactcatttcaaagacgattttactatgtagctcgagctatttagcgcgcgcaaccttacctttactatactcttcttatttaccgttctttcatttatacgtaaagaactggattataaggcgcggcattgttcataacttaatgaatgtcgttcatgatcactcattaattgacgatgaaatgaaaaaaggttactccgctcctttttatgacgaccgtatatttcccgctttaactcgcatgatacgagaccgtgaaggtgacttatcttcaactgaattacaaaaaatcgaaacacctatcctactcatttggggtgaaaaagaccgcgtcgtccctgtacatgtaggtcatcgtctacacaaagatttaccgaattcaaaatttatttcttacgaaaatacaggacatttactacctgaagaaaagcctgaacatgtttatgaagaaattatcgctttttccgcgcaataaaatgaaactttaatcagcctccacctaacttctttgcttccgctaaattttgaggtgaaggtcttactacccagcagatagcgggataatataaaaaaggctgtcggaaatcccgacagcctataatgaacagcttccgccttcttttattacaagtaattccacagctaatttctcacatttttcaagcgcaggtacttcctcaaaagacataaagtatatatgttgaatcttctttgcgatatattttggatcgtcaaacacacttatgacgctcacaacatcgctcgcttctgtttcataaaactccggtcccatttgaaacggatcccaattcttcacaacctctatcatcttttcatatgtacccattcgcttcccgccttttcactttttaatacttttctttatcctatcacatcagctattctataagaagagagagaactttcataacttattggttttacagaagaagggagcaaacttatgcaactatttcataaagcaatcaatcgacgtggaacgcatagtataaaatgggatacatataaaaacgaagaacttatccatgcttggattgctgatatggattttgaagtaccaaaaccaattcaaactgccttaaaacaacgaatcgaacatccgatttttggctatacacttcctcccgaaaatattggagatattatttgtaactggacaaaacaacaatacaactgggatattcaaaaagaatggattgtctttagcgccggaatcgttccagctcttagtacgagcatacaggctttcatcaaagaaaacgaatctgttctcgtacaaccacctatttatcctccatttttcgaaatggtcacaacaaacaacaggcagttatgcgtgagtccattacagaaacaaaatgatacatatgtgatagacttcaagcatttagaaaagcagtttcagcaaggcatcaaactcttgcttctttgtagccctcataacccaatcggacgcgtttggacgaaagaggaacttgtgcagctcggatcgttatgtactaaatatgacgtaatcgttgtggcagatgaaattcattccgatatcatttatgcagaccatacacatacaccgttcgcttccttatctgaagaattagcagagcgcactatcacttgcatggctccaagtaaaacatttaatatcgctggattacaagcgtcgatcattatcattccaaacgaaaagctccgtcatgcctttacagccatccagtatagacaaggcttccacgggttaaatatcttcgcttatacagcgatgcaaagcgcctatacagaatgtaatgattggctaaacgaaattcgattatatatagaagataatgctcaatttgcttgtgaatatattaaaactcacatacctgctctttccgtaacgaagccagaaggtagctttttattatggattgattgttctcgtctaaagctttctcaaaacgagcgtaccgcactacttgaggaaaaaggaaaaatcatcgttgaacctggtgagaaatacgggttaggtggcgaagaacatattcgaattaacatcggctgtccacgatctgttttagaagaaattttaaacagactgcgtcatacgttttcataataagaaaggagtctgtcccgaatcattcttggggcagactcctttgtcatattttgtcggtaaatcgatatatttcaagttacagtcgatatattccaataatcgccgatataatttgagttacagtcgatatattccaataatcgctgatatattttcaattacatttcacaaagaaagctaccattcacggtagcttttactttttcttcatatccgatgctttttttacaattacgccacaagcaattcgatcccctgatttacctgtcggttgtgtcataccatcatcagggttttctgtaataataatagacgctccatcttttctatgaatcgtcgttttcccttcttcaagtgtaatgtgaggtgcatcgatttctgctttaatctttccagaaccatctgcaactacgttcggtaaatcaccgttttctgcacccttcggattaaggagtccatgctttttattatcaggattaaaatgattcccagatgattcaaatcgtggtgctttacactcaccaatttcgtgcacatgtatgccgtgcgggcctggcgtgaaaccttcccctttaatcttaattttcactccgcttgtttgctgagttactttcgcagtccccacttcatcacctgaagcattatgtaatttcacgtcaatttctttcggctttccttggtcacaacctgccatcagaaatagtaaacaacaactgaaaaaaagccgttttttcattttattccctccaaaatatattctgcccttagattgtccgagcatagaaggaaacatacaaaaatgagttactgtttcttttcagctaatagtttttcttcaactttctgtaatcggtctgcttctctttttgatatacgaataaacatgcgccacgtggcaatagcaccgataataaatagaacgcaaacaatccccggaataatatattctgttttatcttccggaaaatataaaggcatcatatagaacactccttattataggatttataaaacatcagaattttctgttatattattttaaattatagtgcaacctccccatattctcaaggggcgttctgaaaacgaaggatttctttgactccttccctcactttccttactataaacttgaggtgaaaaatatgagagaaacatttgaaattggtgaaatcgttactggtatttataaaacaggaaaatacattggtgaggttacaaatagccgccctggcagttacgtcgtaaaagcattagctgttttaaaacatccggtgcaaggtgacttacataacgtaaaacaagctgacgtaccatttttccacgaaagacgtgctttagcttttcgtgagcaaacgaacattccagaacaaatggtgaagaaatatgaaggagaaattccggattatacagattcactaaaattagcattagaaactcaaatgaattcattttctgaagatgattcaccttttgcagagcgtagtctagaaacattagaacagttaaagaaagactacaaactctaaaaaacaaaacgaccaaattacataatgtgcaatttggtcgttactgtgtgctcactttctttaacacttttgaaaaatcaacaagttctcctaatgttggaggtgctggttttactaaatactctttatctttttctactagtttaaaaatgttgtacgtcgtcattgcatcatcaagcgcacaatgatgcttccctgtccctacttttccatacgcctcaattgctttccataatcctgtttgatttctttctccaaaaaacttcttatactcaagagataaatcacgacactgtccgaagaatggaaaagctatccctgccatttcacaattatgcttcagcactttcatatccatatttccccacgttacaattgtcggtttacatttcgtttcgtattctgaaagcttcttaacgagttcaggaaatgaaatccctttatccacgacttcttgttttattcctaaaaacttcttacatcgatccgttaaagagggaaatgttttcggcctaacatgtgatgaatacgtatcttctaccttacagccagcaactgaaacgagtcctacctcaataatctctggaaaaaatcctttcggtttctttctatgctggggcatcgtaaactcaaagtctaaaaataaaaatcgttgttcatccatacgatcccttccttatcatttttgtcattcctttctatttgacactcctacacgaacaagctcgaatgctaattccattttaaatattcagattggatgtatcttatatatatgtcaaatgcccacaaatattttaaaaaataagaaaaaatgacctatgcagaaaatatgacaaaatctctcctttcatttacatccgccattttcctactttataatgacgttatgtgtgtttcttctagagcatttttgacacactaagaaaaagtgaatgaaaggagatgagatttttgcacgaaacaacgcaagaactcgctaactggcagtattattttgctatcgcagtctttttaattacatatgccattattatttctgaaaaaattaatcgcgctgtcatcgcacttcttggtgcagcactcatggtaattgtgggggtcgtcgatttacataacgcctttacgaaacatattgaatggggaacgattacgctactcatcggtatgatgattttggtgaacattacgagtaaatcaggtgtcttccaatacgttgccattaaagcagcaaaaggggcacaaggaaatccaattaaaattttaatttcactttccttacttaccgcgcttggctccgcatttttagataacgttacaactgtacttcttgttgttccagttactttatctattacgcgcatactgcaagtaaatcctgttccttatttactttctgaaattattttttcaaacattggaggaacagcaacattaattggtgatccacctaacattatgattggttctgcaaataagcatttagacttcaatgctttcctattgaatctagcacctattgtaattattattattgcagttacagcgataatactttacttcatgtatcgcaaacaattaattgccgatcctgtacaagttaaaaaattaatgagcttagatgaaaaacaatacattaaagacccagtattaatgaaaaaatctttaacggtacttggacttacaattgtaggtttcatgactcattctattttccatatcgatgccgctattatcgccttaactggtgctactgtacttatgttaattggtgtgaaagagcatgaaattgaagaagtatttgcaagcgtagagtgggtaacaatcttcttcttcgcagggttattcgtacttgttggaggacttatcgatatcggtcttatcaaaatgttagctcaaaaagtaattggtataacaggcggagatatttcttacgcatccatccttattttatgggtatctggtatcgcctctgcaacaattgataacatcccattcgtcgcaacaatgattccacttattaacgatatggcagttgggctaggcttatcaccatctgacgcacaaatcgatgtattatggtgggcattagcactaggtgcttgtctgggcggaaacggaacattaatcggagcttctgctaacgtaatcgttgcaggtatcgcgagccgcgaaggacataaatttagttacatggacttcctaaaagtcggtttcccaattatgatcgtttcattaatcatttctcacatttatatttatttacgctaccttatgtagtagaaaaagcgctctgataatcagggcgcttttttacttatagctacttatcaacaaaaatgaaaaatctactctttatatctcaccggttcatttcgaataataaataagtgaatcggtaagaacaccgaaaatgtgattacatgaataatcgtaaataatatagagttcgttccgtatctgtctaaaatagcgtagataagataaatggacaatacaatcgatacagctgttgctagtaaacttataattggtacgaaattaaaaatgaaacatgcaacatatatgccgaatactttccaccctgcttcttctttcaaaaaatctggtaatttatctttcgctaagtccccccacgtcttactattcaaaaacggaataaacgcaagcaccccgtccgttgcaccatcatttttcgccatcgaataaagtgcaaaagccgttaacaaatatgaaataattgcccaaatcaatataacaagaataaacgcaaaactaagagcaaagaaacctgctagtacgccttgatcctccatcttatcctctcctctctactttcaacatatttcattacattgcaagttatgttttaaaatttatccaaactctttgtataataagagaagaaagagaataagagaggagaaacacgtatgcatccatttgtaaaagcattacaagagcattttacagctcatcaaaatcttgaaaaagcagaacctatggctcgttatatgaaaaatcacttcccatttctaggtattcaaacaccggaaagacaccaattattaaaagacatcattcaaatacatactctcccagataaaagagacttccaaattatcgtacgtgaactttgggacttaccagaacgtgaattccaagcggctgcacttgatattatgcaaaaatataaaaagcatataaacgaaacacatatccccttcttagaagaattgattgtaacaaaatcttggtgggacactgtcgatagcatcgtacctacatttttaggtaatatctttttacaacatccagaattgatttctgcctatatcccaaaatggattgcatcagataacatttggttacaacgtgccactattttattccaactcaaatataaacaaaagatggatgaagaacttcttttctggattattggacaactacattcttcaaaagaatttttcattcaaaaagcaattggctgggtccttcgtgaatatgcaaaaacaaatccggatgtagtttgggaatacgtgcaaaacaatgagctcgctccattaagtaagcgcgaagcaattaagcatattaaacaaaattaccgaataaataacgaaaaaataggcgagactctatcatagatagacgcgttcctctattgagatttaaaaaagaacgtgttagaatatgttcattattattaatataagtagcgatgacggacttataagtacttgcataaaaagcgattcagggatagtgaaagcctgaagccgcaaggaaacggcagtcctgagcaatacatgataaagtggatgcaccttttgtgtatcaactagggtggaaccgcgggcaaacgctcgtccctaggcaaataagccttgggatgagcgtttttttatgttctttttaacatatactgcccgtttccaaagtatcagagtatgtcatcgccaatacgttaactttcaaaaggaggattttcttatgtattcaatggaacaagttgtaaacttagcgaaacatcgcggttttgttttccctggttctgaaatttacggtggtcttgcaaacacttgggattacggtccacttggaatcgaattaaaaaataatgttaaaaaagcttggtggaaaaaattcattcaagaatctccacacaacgttggtttagacgcagctattttaatgaaccctaaaacttggatcgcttctggtcacgttggtaacttcaacgatccaatgatcgactgtaaaaaatgtaaagctcgtcaccgtgctgacaaattaattgaggatgctttagatgcaaaaggcatcgaaatggttgttgacggtcttactttcgaccaaatggctgacttaatgaaagaacatgaagtaaaatgtcctgattgcggtagtgaagaatttactgaaatccgtcagttcaacttaatgttcaaaacattccaaggtgttacagagtctagcacaaacgaaatcttccttcgtcctgaaacagcacaaggtattttcgtaaacttcaaaaacgttcaacgctctatgcgtaaaaagcttccatttggtatcggccaaatcggtaagagtttccgtaacgaaatcacacctggtaacttcacattccgtacacgtgaatttgaacaaatggaacttgaattcttctgtaagcctggtgaagatttagagtggttcgcattctggcgtgaaacttgtaaaaactggttactttcacttggtatgtctgaagagagcatgcgtcttcgtgaccacggtgaagaagagttatctcactacagtaatgcaacaactgacattgaattcaaattcccattcggttggggcgaactttggggcgttgcatctcgtacagacttcgacttaaaacgtcacatggaacactcaaacgaagactttaactatatcgatccacaaacgaatgagcgttacgtaccatactgcatcgagccatctttaggcgcagaccgcgtaacattagcattcttatgtgatgcatatgaagaagagcaattagaaaacgattctcgtacagttcttcgtttccaccctgctttagcaccatacaaagcagctatcttaccattatctaaaaagctatctgaaggtgctactgaagtattcgcagaattagctaaagacttcatggtagactttgatgaaactggttctatcggtaaacgttaccgtcgtcaagacgaaatcggtacaccattctgtatcacatacgacttcgactcagttgaagacaaagctgttacagtacgtgaccgtgacacaatggaacaagttcgtatgccaattagcgaactaaaaggtttcttagagaagaaaatccagttctaattataagaaaaagaggctgctcatataaaatgtaccctatagaatagacacttgaaaaaagtctattctatagggtatttcttgtataataaaaggaaaattcattttagcaaagaaaatgattgattttgtacatgcttaaacaagcgaaaatgtacatgtttatcttgacatttacatattgggtgtctattttagcgaggattagggaaacagtagggagaatgacaaaaggtgtttaaaaaaatttgatgaattatgataagattcttttatttaataaatcttgttttaaaaattaaaaccattaaatacattagaaattaaaaatggcacttaacccttactctaacaagaagtttgattttttttcttagtagttatttggtagaaacaaaggaggtatctgaattttcggttcatttattgcggcaattttagtaggttatctttttatgtttttccattatatgctaaaaattaactgttatttttaattgatttggatgtgaagtatgagaggtatttaggaaataatataagcgcatgacaaatagccttgttttgctataatttttaaacaaggctataaaaatggcgattttaagcaagattattcccctttgataaaatcgtaaattattaacttttgttttggttttgataaagatgaaacatatttttcagcttcttcttttttacgttttaaataagatttatagttttggctaaatatttcaatgaaataagcagcattactcttatcagctttactagcttcaaaacgatcggcagcttgtctgaagaaataccaagcatctctgtcgatatctggtggcattctatttgcaattgcatatgcatctttttcagacagattagtaaatggagaactcataatatagtgccatgctctttgttgatctttacttaaatattcattgaaatcttcttttctagcaaaatagtctttaggttcttcactttgttcattagcttcttcttgttttggatctgtatctacttgttcgtctgtaacttcttcttttttttcttttaatagagtccacttggatattaggtttgagatagtttctgttatctcaattgctagatgccatttgtgtttaaagtaatctatgattttttgataattattatgtattgttaaaatgtatacagaaggacctttctttccagctttacgatttctaatttggtggcagataccaagtttttctagccaagaaagagtttcattgataaggggttttgaaattcccgctttttgggctatcacatcctgtttcacacaagaaaaaccttcgtgaacaagataagataaaattgtttcaagtcctttgtacttacgaggagtttgtaaagaaatgtcttcagtagtaaagccctggtcttctaaaagaatgatatcaatctcctttagaattttttttacggctttattaatatttcctggtttagtagatatacgatccagttgaggacttagttctcgttttgctttgcttaatataaaattttttaataacacgaaaaaacctccctaatatttccagcccgatatcggaaaattagcgagttttttattcacaaaacttcattagttatgatataatttaaccataatattaattttgtaaaaaaactctgctaacgtgggttttcaattgatctagtcgccaaacttcgaatcaattgaaaacggtgggtggagttttattttttgtcttttttaaatgaattgaacttaatttcctgtttatatgaaataactatatcataaatctcttttttaattatatatattatgttatatattctatctttttttttatgaaatatcaacctagtgactaggcttgattcttctgtttgattaatctggattgaattaccttttctatatatcttattaagggaaataaggggatttctaccttttgatttaatagagtacaaattatataatgctaagatctgatgagcagattaattataatctagtatttttgtaagaaagaatactttttatagttggtgagctttttttatttaaatacatttggggggataataaaattgttgttttcaaagttaatagatttatgcgcgctttatgatttgcataaaaaaagaagcaaagaataccaattttcgggggttccggaaatggattttgaagatattaatgagttttataaagtagatcgaacaattaatatgcattttaatagtgaagtgtcgaatttacaaaaaaataaaatcgttaaattcgaatatgaaagtctaatgaaaagtggggacttgtttaatgatttggtaagcggtgaagcttatctgaatagtaatgaggatgcacctaatgttatttttgttcatggctggcgtatggaaaataatgaacgtgtgagaaaaatctttcatgaaaaaatgatagatttagattggaatttatattattttactctaccttatcatttcgctagagaaccggaagaatcattatttagtggtgagtatatggtaagtgcggacatacaacgtactgtgaaatcaacgcaacaagcggttgttgatctaagaggattgattcattggatcaaggagaataaaaaaggtcctgtaatattaataggtgtgagcttgggtggatttattactaatttaacagcattggttgaaccagaaattgatgtgttaacctctgttttttatgcaaatcgtctttcatattcaatttggaacacaaatccagggaaatatattaagaaggatttgtctgttcacggtgttacatatgaggaactcgtggagagttggaaaattactgaaccaagtcaagctactccaataatgaatcaaaagaatattctattgatttcagcaaagtatgaccaatacgttcatatggaggatacaagttatctttgggaagcatggaataaacccacgcgttatctttataactgtggtcatgctggaattgtacttaaaagaaaacaaattgtattggataccatagaatttattcgaaaacgaatattcgaaagcgaataatgttagggtgtatatatgatagtgctggtatttttactgtggatgatggcagccatattatttctaactaatcctaaaaatgaagaaacacggtgggcgagcgcaattgccttgtttggtgggtttggcggtcttggggttatgctcggaatagggccagatcgtccggaattaattttatggatagatgcaatcgcaacatcatgggggcattatttaacgccatatgctatttggatgtttggagttgtattttctggagtatttaggactaattcacaccttaaaagaataataagaaatatattatttttaattccagtcttctatatgtatagtattgatcaaatatatcctgagtttaaaactcattatgtcattttggcttattggacagttccttatgttatgggaacaaatatattaatgattaattctacttttagggagactagaccagctataaagaaaaacaaaatatttacatgtatagttatccttccagtaaatacttttgccttggttacaaatatcattttggaagctttaggtataaaagatgtatggttttataatccattggttattgccgttcagtttgttatatttgggtatcttattataaaatacggttttttagatgttaaaattcgtttcgaaaggcagcacagagatactactatgaaggctgttgcatctggaacagctttgttaaatcatacgattaaaaatgaaatagcaaaaatcgactttttagtcagtcagttgaaagaacataatttaactgaaaaagctaatgagagtatagagttagcacttaattctactcaacatgttttagaactttccgcgcgtattcaaagtaaattagacgttatgaatttaaaggaatcacacttttggttatcagataatattgaatctacattagctttgcttcaaccgtatttaaattcaaatgtccaggttattaaacagtatgaagtagatgtaaaagtgcagggtgatcctatacatatacaagaaaccttattaaatatcattaagaacgctttagaggcaatgagtaatgacgggagattgttagttaagctttataaaactagacggaaagtatatatagatattactgatagtgggaaagggattccaaaagataaactagatcaggtactaaatcctttctttagtaccaaaggcacgaaagggaactatggattaggtctgacatactcctataatgtaatgcagaagcatggtggcgacatttctattaagagtaaagttaatcaagggactacatttactttgtcacttccagccaggagagttcttgacattaatgaacaatttaatatagatgggagattgtaagggatgactataattagattggccgttgttgaagatgatccagtatggatgaagtgtttgtgtgagtatatagagaaggaaaatgatttaacagttattgaaaaagctacgacaaaagaagaggctttttcaataaatatcgaaaatatagatgtgatactactggatttaacattatctgattcaagtgataatgaaaatttaaatggattagaggttgcaaatcattggaatgatagaggttttaaaaatattatcatgttgacttcttgggaagaacaagaaatcattttggaagcattcgataatggcgctataaattatgtgactaaaacctcatatagagacattccaggtacaattcgagatgcatatcaaggtaaggtaagtattcattcggatgtttcttttacacttgtaaatgctttgaagacagaaaggagaattagtgttttaacaccttcggagagggaggtatacaagttaaaagaaaaagggttaaataagaatcaaatcgctgatatgttgtttaaatcagtggaaactataaaaaaacaatttaaaatgattaatagtaaaattaaaaagtgatagtttaaaaatcgtaaaaatattatattttaacatttaaataacatttcgggaaggggtatttttttaacccttcccgaatttattttaggctcgtatcatatatacagtaatttaattattcgatatcgaatattaaggggctgtatatatgatgactatgataagagaagcaaggttgcagaaaggatggactcaattagatttagcaaaaaaatccggtgttccacaaccgacaatttctcaaattgaaagtggggaaagaaaataccctacttatcaaaatatcaaaaaaatagctgaagctcttgggataaagaccgaagagcttatgaaagaatagctatttgtatgacggttgaacgaaattcaattgtacaaataatatcgttcaaccgttatatttttatttatcgtattttgtgtttaatgtcaccaaaatttctatgtcgaatttaaatgaattccgtaatctgattaaatgtaatattcagtggagggagatttatgcatatgcaatataaagaaattgatcaacagttcattgaacaacaaatggaaaaagatttatttgaagatgtactaaataatcaagaaaatccagtggaatttttttataagattctagatgtacttcgaaaaattgaaaataaagagtagagtatcctgtaacagataccctacccacttatttttcattatctggttttaattcttcaacgtcagcttgtgctgtgaaatttaagtaattcacatatttgattaattcttgcttaaccataggctttttgctatctgggatatttttgtacctttcgtagatttcattagctaattgagaaactacttcttttctttgtgcttcatcgtcaaaaacttggtagtttaacatataatcggtgctaacttggaaaaaaccggatactttttttagcatatcaaaatttggttctttattaccaagttcccaacttgatattgcgcttcctgttacgccaagttctttacctaatgcgtttaagcttaacccctgtaaattccttaaattccttaaatttctaccaaaaatgttatcttccaatccaatcaacctttcgtatgttattgcgattagtagatgtcacctaaccttctttattctgtaggagtaaaaaaacgtcatcaaacagttgacgtttgattgataatcaaatagaatatagacagggaggtgagtatttggctttgtcaaataaaactaaatcgacagttttgcgaaaagttagggaagaaaaggacctaactgtaagagaactttcattaggtactaatattccagaaaatactctttatagcattgaaacaggcagaagtggtgttaatgcaaaaagagctaggacaataagtacatatttaaaagaaccccttgaaagactgttcgaatctagtttgtatcatgccaaacttgaggataaataacctcattaactaatcgctttcaaacatttactttttatcattatgtatacccttgtctattgtaaatgataagacgggtttataagcagtgataagataaaaaaatattattttattattatttttcttttattgatagaaaataccttcaaaggggggagtttatggaaaaagaaagtaggcttacattttatgatgtatcttgtaaagctcactctgtaaaaacttttgatgggaaaacatatcagttaagaggtgctgtcgctatcgaaaataaaacaggggaaatcgtaaaaatagcccaagtgtattataaggtacgatcagtagtggataaaaataataaccttattgctaaaaggaaaaatccagaagatgagcttgtagtgataagaaaacccaaaaagattgcagagtaagttgaagtttagcgattttgaagtgtgctgtgagagtattttaagattccgtttgaatgaaatatcttttggtggggattccacttggaattttgtaaacagcacaaattgatcctttgataaatgaatattgcgtgccgcccttgatatggtcactagagggttaggtcgacgagtagagtttggtgagtggaacttaaaactcatctgtggccgtaatttaacagtgtatcgatgatctgattgatataatcgtgagaaatatcccaagtagacgtttcgatgaagcgatcaatatcaaaaggtagatatacgaggttcttcgtacatgccgaaaacgttgtgctgtgtgaggctgttataagttagactgggaataacttataacagcctcatacgaggtcgtcaatctagccataattgacaaaattttattcttttactttatacaaattgattattctcaagtagacttcaaaatcgctaattataagaaattagattttataggtggtgatgttaaaaattcgtgaacaccttgatattatatacagtttacatgagtttaaatgtttttatggatttaaagtatctgattactaaaaactattggcacttaatattttttagtctttcaatagttctttgtgtaattcagaataagaatgtgttagctctactcgtaatcgcaattgttgcattaataattggtgtgttaattagagaaaaaatgccattggctaagttttcgcctggagatacaaaaatgatagtgatttcatctatgtatttatatatcttagggtctttgaagatacattggctattgataccgattttattacatgtaacagtattcattttatcagcagtaatatatgggttaattgtgattttattgtttgtaaaaaaatatatatttaccagaacaataagcggctaccattcctttaaatttctgaagattagcattgaactaacaacagaaggtttgaaaataatcagtatgagttaccgttttccggcagcaatttctataattgctggttttatgtcgctagtattgttacagtggtaatatattttgtattataggtatattaagatgaagtattaaactggaggattaatcatgaaaaaaacaattctaactacaacggcagcattaacaatgatgggaacgggtatgggaatcaatgttgaccatatcaagccagctgaagttaaagctgatactatatcattctatgatgtaccaaataaccactgggcgactaaagcgatcacaaacttagcgaatagaaatattgttgttggttacgggaatggacagtttggttttggcgataatgttacccgtgggcaagttgctcgcatgatctataactacttaaagccagcagatgcaggtaatttcaaaaacccatttagcgatattaaagggcatatgtttgaaaaagagattctagcacttgctaaagttggtattattaaggggtatggagaaggtaaatttggaccggatgacatcttaactcgcgagcaaatggcgcaagtacttacaaatgctttcaaatttgagggaactaaaaaaacatcatttgtagatgttgataaaaactcttggtcgtacaaggcaattggtgctttagaagagaagggcgtaacaattggtacaggtggcaatatgtattcaccaacatcagttgtaacacgagaacaatatagtcagtttttatttaattctattaatgtaatagagaaagagactaagccagaagaaaaaccaaacactggcggagaagttaagccagaagaaaaaccgaatactggcggagaagttaagccagaagaaaaaccaaacactggagaagaaacgaaaccagttaacattccagaatggttagaaacaagtttagcaacgaatgattttacatttacacaagcttggtatgatggatcagaagctattaataaagcagcatctactaacgctcaacaaattgttaaaaatataaatagcaagtatggaacaaacttgaagtatagtgaagtaggggcaattgtacaattagtggatggtgcaagagaacaactttggttagctggtatgaatgtaaatgattttagagttactttcagggtatcaaataatgcaatgatagagcttacgaaagaattagttacacttgtaaattcagatttgaatttggatcaagaaattcaagaaattccttcagcaccaatgaagattaagaatgttgaaaaaggggattacaaaattcgtatcagtccagcaatggcagaccaaatgattacaattataattgaaaagaaataaagagaaaatccgttttagtattttactaaaacggattttttgttagaaattaaaatatccttcgaaatataataggaggaagataatgaaatcaaaattattagtatttattttcgttattttgttatgtattcctaattgtgcatatgcaaggaatagtgatattcctttttatgatggaaagaatgaaaccttgatacggagcaagggtttgcaaatgcctggtaattatttaagaccaggaaaatttttaccacctaatgcaccacctgatatttattatacagctgaccttcattacccagctctttacaacggtagctttgattggggaaaccaaagagcgaacttggtacagagcgttgattatagtgaaccttttgttaatgtagcgaacgatggatatataggaagtggtatcccactaggtaatagaatgattacagaagtagaaagggtaaactcccaagtgatttcacaaaagtatcgggggaatccagattttgttttaaagtatatattaccttatgaagtgacaagtgttgcgtttccaaagtcgtatggtaaattctattggattagggatatggcttatctttcaggtggtatggcaggtgcagggctacaaaaggatattaacaaatttaatatctttattgtacgtactagttttccggatataaaaaaattccaagcatctgacggtcctaaaagtaatacagtagattttcatgttgaaggttttgaatatgtaaccaaaaataaaggatatacagataataatatggggtcagaaactataaatccttatgcggaaatggctggggagcgaaatagagtaaaatgggttctgaaaatatataaagatggttctgaaattgatactaaagaaggatatattcgttctaatcctaagaaagattcagagaagccggaagagggcgatgctggatattttggagggaaaggatcaagtagccctatacgatggcagccaacgacttgtgggaagtttgaagcgaaattacaagtctatgacgctgtacaaagaccagcaaaggaaaagaaaacttcctttactatttcgggaaatggttgtgacaaagagaaaccaccaactccaggtggtgaaggtgatgaagatacatttaagtacaaaatggatttttcagtagatcgtattgagggtgaaactgttgaatctggtgataatgtaaaaacaccggttaaggtttcaagagctgatttttcagaagagcgaaaaaaataccgagaagaattagatcgaaaaatccaggatcaagagcgagaactttctaaattagaggacagaaaacaagacgcgagggaagaattgaatttttgtcgatatgatagaatttgtacaatagatgaagaaggaaatcaacattgtgttccccgtgattgttcatcgtatgaatataatcttgatagaatattaacgatgattagtacagaaacaaaaaaattaaataaagagaagaataaaagggatagattagataaattggagagtgaatataaaaacaccactccaaatgttgttctcaggttccaagataatatagtaggacaacagaaggtcaacttatccgaaggacaatctaaagttttatattatgattggaaagtaccaagttcgggacaaattgaggctgagatcaatcctaagccgcgaaaatatgataatagtaaagatgtattaaaaacaaactttaataataataaattggataccccaattaatgttgcttcacatgaaacctctacttgttcacagcctaattctacagctacagtaacagctgttgtgcgtacaattaataacgcaggagatagggacacattatatgaacgcttaacaggtagtattgtgaatatatcaaagcctaaaataagggcaggatatggatttagttatgaagtgaaaacaacctacacaaatgaagattcatcaagtcatgctacgggtgtgaagagtacaacatctttccttcctacaatggttcaacatcaacagtattcaaaaactgaggatggatacaaagtaccaatggatgaaacactaggaggatataatcaagtttggtcattacctcatacttacgttgaaaaattttcaggaaatgtatttaatgataactataaaaagcatcctaaatacaatcctaatgaaactattttagatggcgggagaaagtggtataccgaatttacacaagcagatggaacgtattcatttaaagcaatggcttatggtgcgggtgttaataagttaaatctttgtcttacgggaaaaattgaagtggaaggttcagggattggtgataaaaaaggaaatgatgattttattaaacgctctgtaaatccacagaatccattcccagggcaagtaggatggaactggaaaaataaagaacctatgttaactagtttatcggactggtggaatacatgggaatatccaaatccaaaagatataccaacagggtatcatatggagagttataaaattactccagaaatgtataagcaaattaaagaatataacaagacgcatggttcagacgtcaatctgaatagtgatttcctaacgagatttaattttaaataataagaaagcctgttttgaaagtgcaattagcttttagaacaggttttttgtatacgaaaaaatatgttggtgaggtgtacaaatcaatgcaaccaccaaaatttgttgtaataatgctggtgttgatcgggattatgttgtttacagcaagtaccggttttatgtttgcagcggatacaaatgaagataatagcttacatcaagcaacagctacagccatgtcaaaaggaattaatatggggcaattaagagttgatgaagaaataaccattaatgagaaagtcgttaaagaaaccctgattagagaatatgttaatcagtcaaatttccatgatggtgaaaaacgattaaatatttatgccattaactctcaaccagcaatgattggagtcgaatcatacaacacttttgctatacctattaagaaatatttaaaagaaccggatgatcaaacgacagttagacagttcgaaaatatgatttttgaagcgaagaaagtaacgaaataggagttgaagaaattggtgaaaaagcttccgaaaaaaaccgtgagtgtattaattgctgtaggcttagtagcgacaattgcaggatatgaaaattacaaaattaatagtgcgataaatcctactaaggtttattacagtaaagttgatattccaccaagaacaaaaattacaaaggatatgttacaagagagggtcattcctggtgatgcaattgcccctaatgctattacaaatgtaaaagatttagaaggtaagtatacagtgaacggatttggagtttcaaagaactctttattgtacaaggacaaagtagttccaaaggatgaattgccggatgcagccatactaaatttgaagaaaagtgaagtagcttttccgttgttggtagatattgaaacgtcatctggtaatagtattatcccggattcttatgtagacctgtattttaaaggtaaggtgaagaatgagtcggaccatactgaaaagcctatatttgggcgtgttgcaaaacatgttagggtaacttcagtaaaagatagtaatgctacaaatgtatttgatcccaaaagtgtagaagttgatgggtcatacaaagacaatttaaataatgaggcgaagaatcgtccgttagctaaaatttatactttcgcagtttcagatgaagaaaatcaattgttaaataagggagccttaattggtgaaattattcctgttgcttctggtgaatcttataatgccaatgttgaaagaacgaatgacgatttgattacaaagtggattcaggatcagtcatataaattaaagtaagaaaggagtttgtataatgggaaaaattataggtatatatggtgtgcaaaggggattaggcacaacaacaatcggtcaatcattagcaaaagttataggtgaatctaattcaaaggtactgtatttagaattagattatttaaatgctacatttgcacataaaacatcaatatctaatccagaaagaaatatggaattgtttatggaaaaggccattctagaaggaagatttgatattcaaaagtatatcttgaaaaaaaatgaggttagagagggaaagagattttcctggtttccgagtaatatggaattattgactttcagcaatgattttgcggaagagagctttcctcgtttcaaaacaaatgtagaaactttagtagagaagttcagtaatgattttattagtaaattaaaggcactagattatgattatgtaatacttcagttgcctaatcaaatagaaaatgtttttggattacctatgttaagtaaatgtgatagtgtagtcagtattttaacaggaaatccaattgttttatcaagatacaagaacataacaaatgtttttgaaaaggcaaacttgcaacacaaagagtgggtacatgtatttaatctatgtagcaataaaattgatgaagaggactacaaaatgttagttgattttgaggtaacagcttgtattccttatgatccagaaagagcggaaatagagttttcactacagttgggatcagaaacaatagatgaatatatgaaaaatattgctaggaaattagggtgctttatcagaaatgaacaaaatggattccgacttttcaaaagtaaatagaattgaatgatctaggggtggtgaaatttatggaaaatgtgatttctttagaagatttaggttacatacctttaatgccagaaaggattaatatagaaacgtttatttatatcatcaaatctggaggacacacatctacaactactaataaagagatacctcaagatttaattgatactgtaaagaaatatttattagatgaacataaagaattaattcaagaatcctttggtgatgaagtcaaaaagaaagcactatggggtgttgtttcacagttcattacatcacagcctaatatagaaggatttacattagaacaacttgctaaaggaattgtagacgccgtagcgggtcttgatgtgttagaagcttttgctgaacaagacactgttacagatattatttgcaataactgggacgagatttggataaaggatttagagaaaggggattatctttcaaatgtaacctttaaaagtaaagaagcgtatctagcgttatgtaataaatttgtaaacgcatctggtcaaacttggacacatagtaagccgaaatgtgatgcctattttccaaatatgagaattaacttagtgggctttgatatttcgaaatatggtgtttcgttagcgattcgaatatttggtaagactttaagaatcaatgatgaaatcatagttgaagaaggtcttgcaagtaaagagatgcttccactctttacagcgatgatgagatcgcgttcaagaatccttatatctggagaaacaggtactggaaaaacggaatttatgaaatatctcttgggtaaaaaagtaaaaaccgataaaacattggtattacaagacgttgatgaaatgaatttgaaacaaatttattcaaaggaatggaatttaagtacttggttaaccagggaaagagaagattcttctacctccgttacttatgaagatttattatctggtgtagtcagacaaactataaaaattatatgtattaacgagttaagagggagagaagcttggggggcaaagaaaatagcagaaacaggtcatgggattcttacaagtttacactctccaagcgcagctgatagtgttgaacgctattctagtatgtgtttagaagctgtgaatatatccaaggaatatttacagcaaagtattgctttgaattttgattacggtatgcactttgaattaatgttagacggaaaacgaagactaaccgaaattgtggagtatatcggctatgaaaatggaaaactaatttatacacctctatatttatttaatgttaaagaaattaaagaattccaggatgaacatgatcaaacgaaatttataatcaatggttcccatgaaagggtagggaaattgagtggtcgtatgattaaagagctgaaatttaaagggattaaaacgtctgaacttgaggttacaaaagaacttcctgtagtgaaagagggggagaaattaattgggatttcttaattatcttccatattttttgatggtagttgctatattctttgtagttaatttgggaatcaatttaattcaaagaagaaaaaaaggcaagttaattgttacgaatgaaaaagatgatagtaagatagtgaaatttttaaagggaaaaggattgtataaatggatcagtcctaactatattctgagggaaagtaaagattttaattggaatttatccttcagggattatcaaatcatactaattatagggactctagttggagctgttgcattgtatggtttttttatgtcattaagtacaacaatattcggggtattattaggagtatctcttccgccaatcattggcttttataagcgtaagaaatacgaagaatatgtggaaaatcagttgatggtttatttagaagctgtagcaaatgcagtttctacacatgaaagtatgacactagcttttaagagtgttttgccgttactacaatctcctataaaagatgatgtagaaagatgcttaatcttatacacggaagatggaaagagtattagagatgcctttcattcattcgtacagaaatataattataaagatattaagctctttcatgatatgttagaccttatttcaaaaacaggtaaagatacggatgacatacttttaaatattgcacatgaatttcaagataaaaaaatataccgtgcaaaattaaaatcaggtatgcaaccgcaaaggaaaacattcaagcaaacggctatcatgcttgcttcattaccggttgcagccttggcgatcaatgccgatgattacgttgtatttgcaaggacgttacaaggaaggttcattcttttagcaataattgtagtatgcatatttagtgcatttaagatagagaaacattctttctacgatcctacagaagatattacaaaaataaaataataagaaggtgatagagtgaatctatatcctttaattttactatttatcttagtcttactctttgtattagtggtttacaacctggtactggaaagacaaaaaagtaaaaggtttcaaatttatagcattgtaaaaaaaagtaaggtggcaaataaaagacaacctattttgtatacaatgctgtacccaattttaaaattaaagaagaattggatatcacaagaacgtgaaaaagaattagagaaaaagctaaaaaaagttaattcgagtcttacaccaatggagtttattattagtaaacttaccttctcaattataaattttttagttatagctagtttaatattttatgttccggatttaaaaatagtaattttccctttagctttggtatttgctgttatgggattttatgtgaaggaatctaaattaaatagtgatgttaaggcgaaaaaattaagactagagcttgaattaccagagtatatgatttctttagcttatatgattggaaaatacacagcatatgaagctactaagagatcaatagaatatgcttcagataatttaagaccactagttaaaaatctaattgcacaaattgaacttgatccgggggattttgaaccatatctggaatttgcgcgtcaattagatataccagaagcgtatcaatttatggtttccttgcaacaagcaatggttatggacgaaagtcgaagtagagaaataattaataatcaaattaagttaatgagaagactacgggcagaatcctatgaaacattagttgcatcgcggccaggtatggtcttcaaataccttatttctacatatttgtgcattattgtatttgtgataggcttcagttttacatctatttatgaaaagtttgttcatatgttttaactaaatcgtaaggaaagaccaactatgagaagtcaaggggagttttttatataaatagggggtgtttttctaaaaaagggcgtgccaaataggatcaaactctccaataaagttagtttgtctagcatctaaaataaaaattgacgtttcacgttgtttgtttcgttcagttttcaaagaactacttagccgctcatttgcgacttccttatgttaacactttcgttatttgatgtcaactaagtttttcatttcgtttgtcgcttgcgacgttattgtcatcggcgacttgttctatattacacctctaagctctaatcgtcaatatgtttttataaaaaatataaaaaggcttatttcttttaaaataagcctttttatcacatatcattctattcatttattatttttctataattggtaacgaaacgataaattgaataataccatccctatattccgctcgaatactaccaccttgtaactcaacaatacttttcgcaatcgctaaaccgagtcccgacccttccgttactctacttcgagattgatccttcttatagaaacgttcaaacaaattcgctaactcttctctcgtaaactcttcactatgattcgcaattacaatttgtatatccctacgctgcctttgaagagaaacttttatatctgcatcatctttactatacttaatcgcattcattagtaaattatcaaatacacgaaccatcttttccgaatcaatcgatgcataagcacgttcctcaggaaacttcttaacaaacgtaagtccatgttcttccgcctgcggtactaactcttctattaattgctcgagtagctcattcatacaaacttcctgtttttctaatacaacttgttcatttgttaacttcgtatactcaaataaatcttctattaaattttttaactgctccgactttgcaaaagcaattctcgtatactcatcgtgttgttctttattttcatatttagaatctcgaagtaatcgtaagtagcccataatagaagtcagcggtgtgcgtaaatcgtgagatacattcgtaataagctcattcttttgcttctctaatttacgttccttttctatattattcataagctcttctgccatattattaatattctcagttaaagctgcaatctcatcttcaccttttttctcaatgcggtacgctaagttgcctctttctatttcctttacaccttgtgccattgcttcaatctgcttcatctttctctttgttatatagaagaaagagaaaatgaatacaagaacaccaattaaaaacgggaatggcccttctttcgtgtcatacattacctctccctctggaattccgctaacaaacatgtacaaattctttccttcaatagtaataggtgaaaaagatataaactcttttcttgtactttcaaatacatttctaccatctgtataattaatcgcaaatgatgctgcattacgaatcgtattatgcaaatcgatttgctcttcttgcgcttgctttgttttatataaaactttaccactttcatcagtaaccaatatctttaaagctctagacccttgctctaaattttggttctccatttcgatcatatttgatatagcttctaatttattttcatgaaccgaactatttgccgctccttgagcttggtgattaatttgttccataccagcccgataatcgatagttgcttgacgattcgcattctcaaaaaatggcgcagctcccttcgctgacaaaactcctaataacgcacaagcagcaaaagtagtaatcaattgaatccttatactctttcgtacgctctttactaatttctcaattaattctcttattttccttatataagtaaacggattaaatatctttttcaatcttataccccactccccatactgtttttatatatctaggtttccttggattctcctcaatcttttcacgcactttccgaatgtgcaccattacagtattatcagactggaaagatcgttcgttccacaccttttcataaatttgctccgcactaaacaccatacctggatttctagctagcaattctaaaattgaaaattccctcggagttagtttcacttcttctccctctacaacaactttatgggtcgagatgttgattttcatctccccaatttctaactcgtcctcattttggacagcgaaaccattcattttcatataacggcgtaactgagatttaattcgtgcaattaactctaatggattaaagggcttcgttacgtaatcatctgcccctgttgttaatcctaaaatcttatccatatcttgcgttttggcagaaagcataataataggcatttctttcgcttcccttaccttcatacacatatgaataccatccactttcggcatcataatatctaatacgactagatgtatttcattttcttccaatagacgtaatccttcttctccgtctcccgcttgtaatactttatatccttcattctttaaatagattgtaattaaattccgaatttctttttcatcatctacgacaagtattgtttcgtgtgccacaatatctcccccatcacttttttaatccctaacttctattataggaaaacttctgaagaaaaacgctcggaaatccttaagattttctgaagacgcaaaaaggtctagactccccttaagtctagacctttaaaaaaccccttttatttacgaacgtagatgaaatatagtacgaataaaactcccataacatacataattggatgaacctctttacgacgaccactcacaaccattgtaattggatagaagataaatccaatggcaatcccagttgcgatactatacgtaagtggcatagagataattgtaaagaatgctggtactgcaatctcgaatttcttccaatcaatttcccctaaggaagaaaccatcaagattcctacaataattaaagccggtgccgttacagctggcgttacaacacttaataatggcgagaagaatagtgccagtaagaagaatcctgctgttacaactgctgtaaatccagaacgtcctcctgctgctacccctgcagacgattcaatgtaagacgttgttgttgatgtacctaaaatcgcaccaattacagttgcaatcgcatctgcaaataacgcttttcctgcacgtggtaatttattgttcttcattaaccctgcttgatttgcaaccgctacaagcgtacctgctgtatcaaagaaatcgataaagaagaacgttataataacaatccccatttgaactgtgaaaatatctccgaagtgcgttaacgccacgccgaacgttggttctagacttggtattgctcccaccacagctttcggagtatcaattaatcctgttgcaactcctaagatcgctgtaagaatcataccgtagaatactgcaccattaactttcttaatcatgaagatgatcgtagtaacaaccccgaagattgctagtaacgttgtgccctttgttaagtcccccaacccaacaagaaccgcatcgtttttcacgataattccggcattttggaatccaaggaaagcaatgaataatccaatacctgctgctactgcaaactttaactccgatggaattgcattaatgattttttcacgaatacctgaagcagtaagaataataaagataatacctgacattaatgttccggcaatggccgtttgccacggaatacccatcgttaagactgctgtataagcaaagaacgcgttaatccccatacctggcgctaaagcaattggatacttcgcgaaaatacccataattaacgaaccgatcgctgccgctaatgccgtagcaacgaatactgcacctggatccatccctgtacctgctggtaaccctttaacatttccaagcgacagcgtagcaggattgacaaatagtacgtaagccatagatagaaatgtcgttaaccctgctatgaactcagtcttataattcgtaccgagctcatcaaactgaaaatagcgtttcatcctatgtttcccccgttatatgattactcgccgtatttcaccctagccctcttttatcccgagaaataaaaaaggcttccattgcatatatacatggaagcgttctataaacaaagacaagtttcccctcatctttatacaaacgcctcgtagtcaagccatttacggtagctaggtagaaactttcgggccatatccccgatattatacgacggctataatattcacttttcgtttgaattacataatcatattaactcgacgaagtagttttgtcaatttaaaaacgaacattttcataaacttttatagtttcgttcgtattaatgccaaaataaaaaagatccatctatgcataagcaatagatggacctttttataaatactattcccactcaatttacaaaaagtatcacataagaacacacactgataaataaacacttttaaaacgtataaaacgcttatttccatctaaaacactcaaataaaaataaacaagtaccatatgagtaccacacaacatataaacaaaagagcacagcgtgtatatacagtgcgatcaacactctatataccgtccgcctactcacgataggcaaacacctgctgtaccctcacgcactattttacagtacgtaagggctcctagcaacagtttgcttacatttggcattctgttgcttttttgtttccaaaaaggagacaagatttataatgaaaacgaaacgtatagacgtaatagcaaaagaagaatcctatcacaatttatccgtatttattgatgtggaagaactaaacaaagtcgttagaacatacaaagacgtcattagaacgtctgttaaacgtgccgatgtacaagctagacttattacattattggatattttaaagcgtcacagttgtaaatatgtaggcgttagtttcctatgcaaaaattcaattgctgacatgatggaagtatcctataaaactgtacaacgtttaatgaagaaacttgtggagttaggcatgattaatcaaatagcaatgaagcgtaaaaaagatatgcgccaaacttctaatgctattattattcagccaattgtggaggaagtgtccaacaaggtagatacaaaaagtcctacaaagtgtcctaccattaaaacaaaacctatttctttaaaacaaaagattaaagatataaatatacgtaagagtaacgagtctcaatctaatgtcaatgataatgattttatcgattatcgagttccacaatctatgcgaatgaaattagcaactgcatttgattcaaaagttatcaatgaatccttccacaatgctgtgaatatcgttaaaaaggctgctaagaaatttaatttactatcagacaaagatgtatttaacaacattattgccaatgcttctgttgctttattctctaaaactcatgaagctgagcataacgggactcttatgaaaaatcctattggatactttactaatacatttaaaactatggtatatgactacatcgatagatttagagacatccacaatatttctaaacgtaaagaaaataaccatgttggactaacaggtatgttcaaacagtttatcgatgggtaaattcgcttatttcaacgggattgtaaataacttaatggataagttttactttgatggggattttatgaccaaataaaaaaacacccagttctaataactaggtgtcccaacttttaaaatgtccataaattgtattttattttacaattctctttatatatccttattcagattcttttaaagtgatgggctcattttcttttataagctcctcttccacaataatagattcttcttttggagaatagtattcataaatttcatttcgaacagaattacgtatattttcattttctttcaggaattgcttagcattatctctaccttgcccaagacgctcctctttatacgaataccatgatccgcttttctgaacaatatctaaccctaccccaatatcaacaagctctccctctagggaaatgccttctccatacataatatcaaattctaaatttcgaaatggtggagcaactttattttttactactttcacttttgttttattaccaacaatgtcactgccttgctttaactgctccgaacgacgtacttcgagacggacagttgaataaaacttcaacgctctaccaccaggtgtcgtctcgggattcccaaatgaaacgcccactttctctctaagttgattcaaaaatatagctattactccatttttagatactgctcctgatatcttcctcaaggcttgccccatcagccttgcttgcagtccaacatgtgatgctcccatatcaccatcaatttctgcctgtggtactagagctgctacagagtctactacaataatttcaacagcgctacttcttactaacgcttccgctatctctaacgcctcttctcccgtattcggttgtgacacaaacaactcatcaatatttacacctaacttttctgcatatacaggatcaagcgcatgttccgcatcaataaatgccgcagttccaccttgtttttgaacttctgcaattgcatgtaatgctagtgttgtctttcctgaagattcgggaccaaagatttcagtaatgcgccctttcggatatccaccaacacctaaagcattatctaatccaacagagccacttgacacaacagatattttttgttcaggtcgctcacccagtttcataacagcacctttgccaaaatctttttcaattttcttcagagcctcttctaatgctttctcttttcctttagttgtattttcagttgctgccatatgaattgctcctttcaagaacattcgtttgtataaattatagaacaatcgttctgttccgtcaataaattagaaacgaacatttacagttgttgcatgaaattggtatgatttacttaatttaagggggatgattatatgaaggttgtccaattaatatttagaggatttcgtttaatcggtagaattattaatccaatactaaaggcattatctaaaagtaaattttaaatatcatagcaataaaaaaaacgcccatttttgcactgcaccaacttgttagacgcaattaacacaatagtgcaaccaaaatgaaaaaaatagttatgaaaggaaaacagatgtgtaaactcaaagaatatgacctggcatatatttgttactattctgagagaatagagttttcagccattgctgctggattttcacaaccggtgtcaactaaggtaatacatcatattgttcaagaattaaataatcagggactatttgatttttacaagagtacctatgaggaaatgttagaagaatgaggagagtggctacatatgttaacgaaatcgcaatacgaacgtttcgcagcagataagcaatgtatcgaacgtgcattaaccatgtggaaagaatggatgtgcaaaaaaaagacttatacagatgaacttgctgctcaaggtacgatgtacgttgtcaatcatatgaaattacgagatcatcaagtttctgtaatcttcgatttttttgatgagtatttaactttattagatcacggagaagaacaagcagaagctttttataaaaccattatgaggatgtaataacagagggttctctcacgaataactaaaaaagagtatattcataaaaaataaaggtggttaatacaatgaaaactacgaattgtgggggaatatcttagtaatacttgccctactctatgcgctgttatatactcttattgagaacacacttctgtagttcccttttggtgtcttacaagaattgtagttttgtcatctttcttttggattgaaacacaggaaaagatacttcataatgaggtgttttttctttttccaataggttgttaaaaaccacatctctttaccatactaacaatacagttgctatactgctatctatacaactttcgaggtgatacagcacgaaaaaatatcaaatcgtttatagtgttttctctcccagtgggcaacaatacaaagaaaagtttattgaaatttacgcaccaacagttgagcatgcaaaacacggaatagaaactgaattaaaaagaagaatgggcgacctataccaatggcaaatagacgttcaacaaatagaaggtgaacaactctcgttattctaaacaacttgacgagataaaaaagaagatgtaaaatgattatccgtgtaaaaaacttggtttatacaacccaacacgttgtgacagatcgggctattgccaacaacttttatgacattcttagttgtgtttagcaagatacacgggagaggtttacagattcgtaataatgaagcaagtagggcttataacttattatggtataaaatatatgtaaactgcatactctagaattgacatctaaagaacttacaacatgaaaaagacatcttcgactggggaaggtgtctttcttacctttagtcaagtgctattgaaagatttgattcgatgaagtaatttattttttagagtgatgggtatctttcctctaaaaaataaatttgtgtacaccaaatagacctaacgagatatcatttttttcgcgaggtcaattgtgctatagtatatttagttgattacgaaccggttgatgctatttcgtaatcatatagtttttcgtgtgtaataagatgaaatgccactttcaaaaacttattcatacacgcaacggatgcaactttatgaggctttctcaaaggttgcttctttaatttgtcatagtattctaccagatgattctttgttttcttacgtaatgtaatcatcgatgtaaccataaagaataagattttccttagtttattgtttccccttttattgattttgtccttataatgagtattccctgactgataacgcctaatatcaatccccacataggcatttaattgcttattatttttaaaacgtcttatatcacctaactcaccgatgattcgaacggctgttatttcccctattcctggaaatgaccgaagcacatgatattctgtacgttcattagaaagttccaccatctgctttacaagctgtgccttcttctctttcaagtctgcaatgcggctggcataatctttgacttgctcgcagcgtacatcgtttcttgagattgctgggtaagagatttttgcagctttaaggagggcggttcctttctcttctactcgtttcaaagacaaccgtttttgtgtatttgcctttaacctactgcaaattctcgttttagaatgggctaacacttcatccgggtgtggatatagttgtacgatattcaaaaacagggacgaccgctttgtaaatagctgttccaactctggaaaactcaattgtaggattgcgtgtaaccgagaatataaatgagtaatctcaatgtctaactcatcatagtaacgtgtgagtccacgcatctgttggtagtatcccttttcttgatacgtttgttcacgtcctactcgaaagtgcgattttgccagttcatgcgcgtcgcttttatctgttttttggcggcgcattgaagccgtttgtaagtttgcttcaagaggattaatacgacaatatgcataattattatcttgaaagaatcgttccaacggtttggaatatacacctgttgcttcaaaaacaatttcaggttcttctccacctcgacctatcagttcctgaagcgtttcatgaagctgttcaaaagagggacggttatggttaatttccttctctacttcacattgacggtatcgattgtaaataaccatcatacttttacccatactgacatcaaaagctacaacgtgttgcatgacatgaatctctccttttttgccaatcatagaagcctccacagtgccttatcgattccactttcttatacacgatctcctggatccaacatactaaactgattcaaataagggtgtgaagtcgatctgtttatttatacggactccaatatggtccaagacacctttcgaccttacttcacttctactaaaaaaaatagtagcacaaaccgtggccttggtttgtactactaatgttagtatgttttgcatattacacggtgtacctacatataatgaaatcgacagtgattttttctccttttatgataaatctattgaaaaaagcattcttggggacgaatgctttttttctattccctatttcacatacacataggctccaatcataaaccctatattaaaagtaaattttaattacatataaaattaacacgttcctcttttataataaaactattcttttgtatagtaatgtgttttacttttcaaactttacatattcacctgaaacccattgatcaccaccaacattataccaaccgtccctatatccccaagactgatatctttcgctttggtgtacgttttttacgacgccataattagttcctgggccagtacgaacgcgtaatacatctgctgtaatagtaactacccctaaaccatcatttgaaggttgcgaagttgtggatgattgtccatccgcttcgaaatgtaaccactctgagttttcgtaaacccactgatcgccacctaaattaagccatccgccagaacgtccccacactttataattttcaggtgcatttagtttcctaattgaatcatattgagtccctggtcctttacgtaagttcacgttttgaccagtaatataaacaatacctgtaccacttgtaattggtggttgtggaatctgtggcgtttctggaatttgaatttccccaccagaaactaattgttgtttaaaccactgtacacgcccttcattaatcattctatgaggacaatatttaccgtttctttcttggtgtgttttaactttagaaattggaatgttgaacatatccattaactgacgaattacttgagcggcattcaattcagctttacgatatctttccccacctgacatagaataacaaatctctataccgatactattacgattacctggtccattcccatcacctgcatgccaagcatttctattaaacggaattaattgaatagcttctttgtcatctacagcgatatggaacgaagtacctgtactattgttagcgacattattacgttcgtttaatgccgtagcatcattatacgtgttgtggaatgtaatttccgttggattcattggatatggacataaaactgaataacgactttctggtactaacatttttttgatttccattactgaacatctccttttttctcttcctgtttttgtttaccgcccaaaatttcaactgcatttgttaatgctgaaggtaaggggattcccatacgaccagcgttttctaaaagtgaaagcaactcattgcccatgaagaagaaaatagtcgcttcacgaattgcactgttacttcccagtgctgaatctagttgagcggacgctccgaccaaaagaaaaagcaccacctttttggcgatgcctttgaaaccaactttactttttaattctccgttataccctgctgcaatcatgccagttaaataatcaataactgccatcgttactaagattttcaatgttgcatcccatcctcccaaaaaatacccacaaaagcctccaaatgtagctataaatgctttcattaatatatcaatacgatccatctttccatctccttatttataataaaaaagagagacgcttgtccctctctcaataagtacttttattttaagatattaaatcatcccttttaatattaaacccaagactgacatagtaattgcactaataataattcgtaaaatccaagttgtattaatgctaatcttttctaattgcttattaattgtagcaatgtctttctcattaattgttgtgcgagtttctaaattacgaatatctcgcataatttctttttgttctgcttttaaactgtcgatttttacatatacatcttccactgcattcacatccttttaaaatcttaataaaacaatctctacatgatatgagacaaccttatttatggtgaatgcatcgcagaaatttcaaaacaaaagccgtattttgtgcaaaataaaaacagcttatggctgccctatttgcgttgtattttcaattgttaatgtctcttgtggcggatattcacctgtaagtttaaaataatcatttgcacaaatgttccttttagcaactcctaagttcaattcatataatttggctccacaaccacataactcacatttcgttaaaaccctaaaaccaatagttccgtcagacatttccctccacacctcaactttactcgtatcattggaaacccctgcattatctaacatgtcagcaggtacttgtataaagactcctgtttccgttcgtttcacgtctactattcttcccatataaggaagcgtttcaccttcttgaaaaggcatcatatagttaatatccatgtttaatccttcctttctatccaagtgcgttaaatttccagccacttggagtactcacataaaaacccgctccagcattaccgtctgtaaaacgaatatgtccccattgttggaatccaccgccacctaagttaatcccctgcattgctcgtatattcctatggattttcacttctttttcagtacttatatcaaacgtttgtccgtctggtgatggagatatattattattcacaccacctacagcaagcgcgttaaacggctgaataccatctgctctttctgctgcagcacgatcccaattatacatagatgcatatttgccactgtataacgttacaccacttacacaaattgctgtcccttgtctcatgtcagcatttccagaacaaactttaataattaatgcgtgctgttgcggaatatagtttgttggcactttgaaagtgaaagagtatcttctgatttctccataaaatgtagacggttcaggaaaatccattttttgttcattccatatatcgtaacttacattgtctcggaatttaacgcagcatacttgtaaacgaggtttccctgttttacgtgcaccatttatcatagctgttctaaagtgagcagaaactgtatattcgttaccaggatgtatcccattattcacgactgtttcgggatagttatacatatctacccttgcagcatttaccatttgctcgtaatcgaatatatgtgtattcttttctattacgacatttccccatgacttccaagtaagaccatatccaccttcaaacccataataatcggtatgtccaatgtttttctttgtaacactagaaaagtcgggatctgatattaggtttcgtcttgataccgcagttgtttttgttccccattcgtcttggaataggaaatctagcattttaacagttacaccatctttatcaatagttatcttatcaccgtcaattctaataagattcgtatcaatgccttttgccgttaaccatttcaccattgtatcggcattaatagctacctttgaaacatcaatctctaatttttccgatgaaaagttaatagctgcgatgatattcccttttttaacttctgcaaggattccttcatcaagaaccttaagtttagaacccgttgcttttacataagcggcgtaagtctcatttataaacgtttcttgtttttcagaaatgattgaaacgccctctttattagtactaatacttctttctaattctgtaacttttttattgtaatcttcagtagctattctattggctatatcttctagcattttgtcagcatccgtttgatcttttggatgtagccaaaattctgtagctatagtgccacgttgtaacataggtgcagcacaccataaacgtccatttcttgtaacgtaataacgccatctcacaaacgccgcattagctggcgctttatctgtgcatacagcacgaacccatgtatgatttacaacagtgatattcgttctagctgtcttaatgcgagtttttttgtcagcagtccaccattcaatttcaataaatgcaccgccaccatcaataggtgttttcccgtcagtattgaaataacctgatgcaacaaagtcttcgttaacctgacactcaataaattgacttgtaagtccccaccaacgatcttgggactgtccagtaacagtaattgcaaatgtattcatacctttgtattttaaattcgtatcaacagcaccagtagccccattaccgctattccaaaaccaatatttcggtcctaacgtaaaattagcatcacgcaactcgttgacagtacctaaaccacctacataagcttcaacatctttctttttcattgctagcttcaattcttcagattgttgcaggatcgttgtagtagcttgagtcagtgtttccccttgctgagtttgtatttcctgtattttttttacatcacttgttatcccttcggcgttccgcgtaatctccgttactttctggctgaatacattttcttttaccccatcttccggagacggagcgtatgcttttggcatagatccttttaacacggatacatttttgaagtagcactcactaccatcagcagaacgatcaccataaatatataaactaaacccttttttcatatctgatttatcatgtaatttcattgttgtatgaactcgaacccactttttaacaggttcgatggtcaattctggcgtacctccactatgaaagcccattgtattgttaccctcaataaagtggtgtaatcctaccgctattttgttatttgctgtttccgtccatacatctaaagcgatcgtgtacgtatcacctggctggaaatcatttcgaaaactagctggcatttcttgaggcattccaagccaccttttagcttgaccgaattgaccatttttgttaataacagcaactacaggatacccaaactttttgtcatcaacgtgcatatgataaccctttgtaggatctgttgttccagcgttataacctgttgcccaattaccagcgcgcaaattaccgtttaggttcttatcccattgcagatcgttatcggcccaatagtgtgtgaaatctccgttacgtgcatagttacgatcaccagcatcattaatgatagattccgttttttcaatacgttcttttacaccctcaaaactttgctccaactcataagtcgattttgtaaaacctgtaggaacggaacctttttctagtttaggtttcttgaaacgaaatttcttaccctttgaattttcgtttctttcaaatcgtaatcgcaatccccatccagttgcccgcgcatcaatcttaaatgtaaatgatctcctagaccaattagcgacaggaaatctattgtacaagttttctgcccaaactccattaataaattggaatacaattaaatcaataagagcatcattttgcatatcgatactaaatgtcatatctttctctttttcgtagtcacccatcttagtattatctagatggaattgatagaaagagtcggtatgatctgtacattctacgatcatgtaatcctcagtgaacgattgagcagctttgttgactagtgcgcctccagacattccaattgtttgtggcttttgatttcgcccagtattgattagccagttttcaacgcccactgtacgagattcaacctgctccaattttttagagattctcccagcctcttctttgatctcggttgttatcttggtgaaaacattaccatctgcaatatcttcaggagcaggtcgccacgaataatctttactgcctatagtcaattgtggtgaactctgctgataccaacaaccagcaggagggtttgcatcaggttctatacgtaaatgactctcgttatctgttcccggtaacgacatcatacttgctgtcactgtgaacgaaacgcttaccctttgccattgattagtagatttatttggacggattccggtagcacctggtgcaaaatagaaagtgtgttgtaattcttggccatccggtaaaccttttactcgagtataaattgaataggttactttatctcctactttgacaactccccgattcaccaaatctttgaagttataagctaaagcagtccatgatgattgggtttcaacaactgcattaccttgaaaaacatctttcgaaattttaactttatcggctgatttaaaccaccaacgattgtctgcttgcgcaaagttcaaagcaccatcaaaagatttagaaccgattaataagtttcttacatcgtcattaatgtttgctacactttctttaacttgtgaaataactttcgtatttccgtccacatcactttctaaggtgttgattttatttgtagtctcactactatttttcgttaatgtttcaatagacagtttaaatttctcagaatcctgttcaacctgggttacttttttatcaatttcaccttgatctctttgtacgtcagaaatagttctcgtaactttttgaagactttctgttactgtattaaattggccagtggtttcttgttgcgcttcttccactttcttatttaattcttcttttgcgagtttaatatccttattaacctgctccagtgtatcttttttaattgattccacatcaggaataaggagttcccaacctttaccgttccacacttttaaaacaccaggtttaccgttactaatatctcgccatatcgtcttaccaattttaagattcgttgttggtggattcacagtttctagctagctttttagaaagaataacgttttttgacacttgggggtagtgcaaattcttaagttgatgggcatggggtagagacaatataagagattaagaatgtgtaatctcatccaaatataatcgatgtctttaaaatcagaagatgctcataatttctaattaaaaagaaggaaacttaatattcaaaatcagaacacttaaaaaccaatcttttaaatgtagaagttgtaaatactcccccttttttctttattagaaaaatatagataacctattctatttcactattgtttaacagcattattattctgataacattttaagaaaagttgttgccgcccaaatgaaatacgcaagttgcgtaacgatatacatcgtaatttcaaaacctgtaagctttcttaccttttttattttctttaaatatctataaaaacaaaatgaacataaaatcagtaaaacaatagacatttgatatagattttccactaaaagaactgccatttatttcatcacctttccaataaagtgaaactttaatcagtgggggggttgttcatcctccactgattatcagccctcaccagtcgggatttaacgggataaaaaatatatagttcaagcatatcattttaacggaactaattaccggaattttcaaattaaatgaacttcctaagtaaaagaagtaactttttggaaatgtttcaatacaatattatgtaattcaatacgctctatataatattagattaggttttcttttactgtacatgcttaggaggaagttttacatgcaattgattcataacatacaaaaaacgtttaataacctatgtaactacgatacggtcaatttaatacacgctattcaatcattaaatatttcacttcataaaatatctccttttattacttcaccagttaatcttgaatacggacggaacgttatctatcagtctgaatttgtagagattttagtattaaatttccccagcaaagcaaagacttttgtgcacgatcacggaatatctgtaggatgtatactaatagtcaatggtacgctacaaaatataacgtacgaaaataatagcgagcggattgaagagtttacagagggaaatattttcacagtaaaaaaagatactgtgcataaaatgtataatgctacagattcggcagtaataactttccacgtatattcccccccattaaaagatgtccaaatatatgaatagtctttagaaggaggaaatatgcaaaatttgaaagattactatataaagagcttacaagatggtcgtaacgtttggctctatggacaaaaagtagatgtaactacagacaaacattttgcaggaacattaagtaccatttctaatttattttcattgtttgatgatccaatacgaagagattctattggatatgttagcccaaaaacgaaagaatttgtccatacggcctttttaattccgaattcctataacgaattattaatgaggagaaccgcttttgaaacgtggagttatgctacagacggtgtaatgagtagactatctgattacgcaagatcgagacttaccggctggtacgtatcaaaatatttttataaaaaattcgatgtacagtttccagataaaattacatcttattatgaagaagcgagagataatcacttgttcttaagcgtagttcaacgtgatccacaaataaatcgatctacagaatcaatgttgaatacaaatgacttaggattactaagagttacgaagaaaacttctgacggaatttatttaagtggtgctaaaatgatcggtactgcttctccttattcacatgatttattaatctatccattagcaaaactgactgatactcaaaaagatttagctcactttctcattgtggcagccaattctcctggattacatatggtttgtagagaaccatttgcgaatacacattcaattacagttgattcccctcttagctcacagtacgatgaaatggatgcactattaatctttgataatgtatttgtaccatgggaacgtgtcttactatataacaaccctgaagcgttatgggcaataaagtcagatatagcttctagtagtttagcttatcaccaagcaattgtacgattagtagtaaagctagaatttataactgcaattgcttgtgaaattgctgaagcaatcggtgctactacttatttgcatgttcaagagaagcttggggaattaattatgcaaatcgaaacaattcgcgcacttttaattgctgcagaagttgaaggtactacaaatgaaacaaaaacttatttgccaaaatttaaatatatcgaaactgcaaggaatcttggttccaaatattatccccgtgcaatagaaattttacaattaattggagcaggtggtttcattcaacttccttcgagctcgaatgacttccagagtccaatagatgatttattgaaaaagcactttaaaggaacaaatatagatgccgaacaacgcacaaaattatttaagttagcctgggatattattggaagcccattaggatcaagacacgaattatacgaaagattttacgcgggagattcaatacgaaatacagctacgcaatatgtaaattatgataaaaatcattttaaaaagatgctaagtaaatatttacattaatgaaaaagagcactttttgctaagagtgctcttaaaaaacatatagttattcagttacatatatagttgctccggccacaactgctacttttctccgtaatcgtttcattttattcagctttataacctctggtatatgcttcctatcatatttcctcatataggcttctccatctggagtaactaattgtaaaacaatctcacaacaaacctcctaattcaaattattactttctaaactgaaaatccaactgtcttgattgcttgatttcctcaattactttacgaataccttcttcaatcttatcttcttttacattcgaaacatttaattttaatagtttttctttaggaaaatccctcatataattcttatcaatagtatcgacacttatttgaatgtcacctaatttttgtataagtgtttctgtaactatgtttttctgcatttctaaacaagtgtgtattccaagtgtgttttgtctattatatgtaaataatgatgaatttttattttgcactttttctaatgtttctgctagttttattgatctattgtagtaggaagaattaattttacttttatgacgttcaaacataccactctttatataaatttctaaagccgcttgagaaatcatcggactatcaatatctagtatttttttgtatgtatagaaagcatttgcaatggatcgtgggatgaccgcaactccaacccgtaaacctggaaaaataatcttcgaataacttttcaaatatatgacatgactacaattatccaagctatataacggatctgcttttgaatcagtttctaaatctgctaaataatcatcttccactataaatacattgtatttcttagccaatagtgtgattttttctttctcatctttagaataagacgttccaagcggatgatgatatctcggtatcgtatagaagaattttatttttccggtttgaaatatttgctccaattcattcaaatcgataccttcattcgtacgtttaataccgattacaggaactttatttatttctagataatcaatatatagatgatatgttggttgttcaattaatacagtttcatttccattcggaaatggtatagaagttaatatagcaagtgcctgctgaacacctgacgttataaaaatattttcttcttttgtaaagacttgataatttgctagttgtttttgaataactggtattaaagatggtaaccctttcggcgttccatatacaaacaaatcatttttatacgtatcaatagccttattaatacaatgttgaaaatctaaatatgggaaaacatctggatctggtgctgaggaagcaaaatcaattatctcgttattttctatggtactcccagatttcttaacaacgtaatatccactttgagggacagaatatataatatgacgcttttctaattcatgaagcgcacgtataactgtcgccttattacattcatattgcgtaacgagtgaccgtatagacggtaatttctttccttcatttatttctccattttgaatcatattttctatgtcgtttaaaatatgtaaatacttatacatattacacctccttcagcaattttctatttaattatatcgattttatattcatatagcattcattcctcaattagttaattttccgatcatctatatcgtaaatcccaatagcgtatgaatcattttcaatccatttctttactgcttctgttttaagtaccccttcaacttctttttctattttctgtccaagttctctcgcccctacttcatcatcgctaatcttagtttttatatcaatggtaacaggttgattctttttataatttatttgctgaatcccaaacccttcatatccattcttcctgaatacgtcatcaaatatctgtccaaaaactaactcccatctatgttctgcatttacaatctccttgtttctttgagatatatttactttataggacataataccttgaatttgcaatcttttattaatttcttttttatttcgttagcattttcgctatcagcaatttctaaatctactattcttgctttttcatcccatatagcagcactaaaaaaagattcctcctttaccgctgctgtagcaatatccatcactatagaatcttcacttttagcatcttcaatctcattctcacaggcacataataaagcaaatggaattaaaaatacaagtacctttgttccctttctcatgtagcacccctccacacattttcatttacgataaactttttactttgacatataaataccttctataattattaaatttaacattatttcacattttccccacttaacaagggaattacaattaataaatagaatatctctatgaataaataaaaagtgagggatatataatgcaacgtgtaaatacgattgatattagtaatgtactacaattggaaaaaactctttcgactttattaaataagatgatttcttcaaaactagaccttgaaaattggttaaaagagcagtcaaaagtaatttgggaaatcgaagaacaattaagattacattacatcgcctttcaatgtaatacggatgatgaagaaataaaggatacatttgaacatgatcaacaatttgtaaagccacttttaaagcggtaccaaaatttattggataataaatatttagagtcaccttttcgaatggaattagattctaacgtatatggtttattagatacaaaaataaaaaatgctcaaaagttattttgtgaggaaaatattgaattagaaatacaggaagacaaattagtcacagagtactttgaaatcactggaggattaagtgccatttgggacggagaagaaaaaacgataacagaattacaatcctatttacaagattcgaatcgtgacatccgtaaaaaggcaaaaactattatttctgaacaatttttatctgttgaaaaagaactccaaaacatattaaatcaattaattgaaattcgccatcaaaaagcaaaaaatattcaactagagaattatcgcgattatatgttcaaaaaatacgagcgttttgattattcagcgatagattgctatgaactagccgaatccatacgtaagtatgttgtgcctcttaaagataaaataatgctagagaaaaaagaaaaactgcaagtagatacacttcgcccttgggatgtatcagctgtaactccagatcaaaaagtacttaaacctattgcaaatgaaaatgatttaattgaaaagagcactcatatctttaataaactagatgttgaattttcagcacttttaaaccgaatgtataaacacaattgtcttgatttaacaagccgcaaaggaaaagcagctggtggcttttgtgagtacttaccagcttcacaattatcttatatttttatgaacttaaattatacacaagatgatattatcacttttatacatgaaatgggtcatagtattcataacgaactcataaagccattagaattacgacagtatatagaaattccagctgaaacagctgaactagccagtatgacaatggagttattctcgcttaattattgggataccttctatacagacaaaaaagatttaaaacaagcaaaaattaacttctttaaagatgttatttcatatttacctattatgcttattgtagatcaatttcaacactggctgtatgaaaatccaattcatacttctgaagaaagaaatgaaaaatacttacaacttcaaaaacattatcaatctagcgtcatacatattgatggctacgaaaactggatagcaacgagttggttacctgtactccatatttttgaagtaccattttattatattgaatacgcgattgcccaacttggggcattacaaatgtataaacaatataaagaggatcctaagcaaacactagaaaattataaaaaggcattatcactaggaagctcgcaatctataaaagaagtatatgatgcagccggtattcgttttgatttctctggtgaaaccattaaagaactaatgctatttgtagaaaaagaattagaattacttgagcaattataagaagaaaactacacctatattttaggtgtagttttcttcttcattttattaatcagttctatgtactgagtatcaccatatccgattgttggaaaaagataaaacaactttgttaataattcttgatttgataaacctttatttttagagatgaatttcattacgatattatcttcttttagcatttctaaatataaatctatagcttgatacattacaggtggtactttatgataagtctttttatggtttactaatacttcattgtatatagtagaataatcccccaattcaagttcaatttgatttactttaaattcatcctccctgaaactatttaagtatactttcccttcatagcacgactgctcaaggtatgaaagtaaagtaagtagattcatttggcaaaacatatcttcaccgaaccataaaacaatacatttatactttttcgcaaatagattttctaacggatctataactttttttgcataattttcgactgaactgttatgaccttctgctcttattttaataaactcttcatcaaaaacttgtgcagtaacgctatttacacacatggcctcgttaaatggggcataatcagactcacccattagctcctccgttttaaattcttcatacatcatttgaccattcaatatgttaagtacatctttatcaaatagctcactattcttattacgtaactgttcaacctctaattttctagaaatattcattttgaactccccttctttatttatattgagtttaacaaatgattgaataggcatgttgttcgttggtattctcttggattcattccaaaaatatttttacatattcaatttagccgttcctatttatagtgcgatagaatattcatttgctggaaatgggaatatcattgactatgaacattctattacaaaagcactatttgaaggctaccaagaggaaaatgaactaccaaaagagatgatagacaagtttccattatttattaaattaaaggagatttttgaatatagcttaatgcatatgtattgggataaagaagaattaacggaggaacaagtacggataataaatctttataggttaaaacttgaaaataattattctttaataaatatgtaaagcgaatgttgtttaactacgtaactatagttgaacaacatccgctaaaaacttgaccgattggtaatgttttacatatcatcttttattagttgtgattcttttacgtgctgtttcttaattaatatggctttatacaaaaacactatacctagtacagcgaaaatgatacttacaggaatgcgggcaatatgaggaaggtagcgcggaagaaaaaatagacggactctttcatccacatcaaatatttcaaagacaatcggcactatactttggtgcaccaagaaaaagattcccataaacacaagaagaataacaacggcaagttttttcttcggtaattccatttctttattacgaattttctttttgtaattatcactgttaattttcatcccacttttcatttcaaatagcaactcagggccatttctttcaagttttttgtaagcgatacgcccaaatagccatgctaaaaacactcccgtacaagccccagtcggtacacctaaccattgtatgaattgtatatgtaatgatgtccccaaccatataactagtaacgaaggtatcgttgttactagcaccatcaacagcatgagccacgtggttataaacattttactcgcattcatatcgtcaccagatattatcgttcctcttccacggcaatgtggatcagtaattggaattaaattaactacagaaaataagacaataaggccgactgccccaccaagtaaagctgggactactgcaaatacccatggataaacgaaagtaagtccgctagaaaaagtgaaaattattgtagttaaaattgccacaggaccaatagctatcaaccaagctaattggcggccacgcacgtcaatcctttctgcgccaggtgtcaccaacgttaaccataacgcgcttccatcgaaaccatataaattacaagcaaacatacctgtaaatacaaccataattccccccgcccaaggcattaagtaaggtatattagcaatcgtaactaaaatcccataaaatacacctatccatatgcccattcgcaggaaacggcctcgttgtggatctcttctccaacttttaagttccttagttataacagctcctattttagtttcaaaaaagattttaaaagcctttctataatgcttattaataatcttcacttgaactttttttgaatctatctctttacgtctagtcaataatatagtccatataaataaaagaaacccacaaaatattgttattgtacctaagaaaataaaagctaataaccaattagattgactagcgtactctacagcaagtatcgtccaactagatggaatcatgtaaaatagcgtagtatcactaaatatgattctattgattacaggaagtgcataccagccgacatttagaaatgcaatgatgaaaccaatgaacatcgctcccatttccataccgactcttgatttcatcgcctcacccataatactaactattactttggataacaatactacaaaaactaactgcaaaataattgctggaactgctactataatcgcatatatgctaattctagctgcataaattaataatcctataaaagctaaaaaactaaccagtggtcctactcctataaaagttacaccgagaagcatcctagctagtttataagaattgagcggaagcaacacaaaatattcagggcgtaatatttcgtctcctccagtaagcatcggacctataatccatcctactgtccaaatggcgaatgttacatatagaatgctttttgatatattttgttctgttggataaaaagaaaaaagtagaatagttccaattgctagcaacaaaccaactaatcctgtcataataaatagaactgccctgccacgattcattgaatgtttaagtattgataacttcatttgaattaaaacattaaccaagacaattcccctcctttagcggcgggtttacctactaatcgaatgaaaatatcctctagtttttcttcaccacaaacatcttccatctttccagatgaaagtactccccctttcgaaataattgcaacgtggtcacaaagttgttcaactaatgccatgacgtgactagaaaatactacagaaccacctgaactaacaaatttctgtaaaatctttttaatagtagttgcagaaataggatctaccgcctcaaacggttcatcgagaacgagtaattttggcgcatgaagaagtgcaagtgcaaggccgagttttttacgcataccagtagaataattaataactaaagtcccctcagtattattcaactctaatactgcaagtaattcttctgcccgctgagcaacttcattggcatctattcctcttaacaaccccatatatgttaataattcgcgaccagtaagtctttctggtaaagccaatccatctggtaatactccaatcaacgttttagcttgttttggattactccaaacatcaatcccaaaaactttaacgtttccgccatccggtcgtaacaaaccaacagccattgataaagatgtagtttttcctgctccgttaggtccaacaactccataaaaagaaccacttggaatagttaaatcaatacaatttactgcaataaattcaccgaatcgcttatgtaatttcgaaagttgtagcgcaggagcggatttctcaaattcggtattcaatgaaatcgattcatcagttttcataaaacagactccttttttactactatattctttgtaaacaaaatccaataattttactcatttaattacaatactgaagcattaatttatttagcaattcattgttattagctgacaccttttacgtattccataataattgcctgtctatcgtgtatctttgtcacttcaaatacgtttggaactggcagcccgcatgaataagcatatttttgtttttttgcttcattcatagactctgtacctggaagatattctttaaataacttcacaatcttattatcatacagataaatttccgctgtatttcctttagccattggctcacctaagttcaagtttcaccctccttaaaccatatagtattctacacccctattttaaattcactgcaatgttaggaaatccttctactcacataaatcctattattacaaaaatctctgaaatgctaaaagaaaagtacgtatcgaaaacagccatataatttttcagcataattatagggcgactttaatgatgttgataattttttgtttcgtttgacttaaataattgttatttttagtagaaattaatataccaatcgggattttagaattaaagtccttaatcttaaaagatagtatttcttcattcaaaattgtacctttcgggataattcctatcacattttcaaaaagcatttctggaatgaggtttaaagcactacaattataaactcttttaaaaaataaattatttttcgctaggagagaacttacagattgatacgaataacaattactttctcctacaataactggataatctataatatcaaatgcttcaacggattctttttgtaacaaaggatgctcgggattattcactataaattcaatctgttcatcacatattggggtgaattgtacctttgatttattttcattatttccgcacaccgcaaaatcaatcttattatgttctatcatttctgataaaagtgctgtatttcccactacaaaatcacaatgtatatatggtttttcagcatttaaaaactttaatattattggtattaaccttttagcaacggattctaataggcctattctcaaactccctttttcttcattactaatacgttgtgcttgagttatagaatattcccaatgtgttactaagttttctacttcctctgcaaaaagttttccttcttctgttaatcttgcatcccatcctctttcaaataacagaaaaccaatttcattttccagcttttttatatgtgttgttactgttgattgtgcatagtttaattgtttagcagcttgtgaaaacgttccttcttcaataatttttttaaatgtaagtaactctttcatttccatttcatacaccatcttcatcgattttattgataattcgttaatatattttcaattatacaaatggaaatattggaagtaaaataaaatcaaaaggaaaggagtcctctattatgccatttgtcactgtttatcatcctgaaaaattatccgataataagttattaaaaaatgtaagcaatcaaattcaccattcgttaattgaacatttcaatattcccgaaaatgattattttcaaatgtttttaccttatccttctcatcaacttttttataattcatcttatcttttagaaggttcattaaaacgatccaataatatgatttatatttctattacatgtggacctgggagaacaattaatcaaaaaaaagatttatataaagctatagccactagtacagctaatactttacaaatctctactgctgatgttttcattacactacacgagacacctatggagaattggtcatttggtcaaggaatagcccaaatgttaaatcaacataataactagactttaattttccttaaaacaaaataaacttaccgctttctataactatatagaaagcggtaagtttattttgctaggaatattggaatgaaactctggtgtatacacaatagaaaatgaatatccctgcacaataaatgacacttcattatgtttacattcaaatggcacattatttttcttaaagttaatttggattcgctgtaaaaatgcgagatccgctgttccgaaagaaacatgaactttcggtggtaaagctttcatcgcgattggaatccaaggtcgctgccaccaagttgcgacgacataagcagtgccaccaactacaaagttaaaaatatccccgtcttccatcgttttcatatttagatttgatttcagccattccctaaaaataggtacacttttaacaggaagaccaatttcccttacatataaaatgtttaaaggtgactgcggtactaatacatcttctttaacataactatgcgcgataatttcgagtagatttccatctccgtctttaaagtataaattgaatcgaccatcctcttcatcaattgtatgaccatctttccatttcgcaatgagtaatccagactcctcaagccatcttgctgtttcatgaaattttgaatatgggatttcaaaagcaaaatgtgcaggtgcaattggttcatacacttcttgaaaactaattgttgtataaggtgttacttcaaattgaatgaaggatgctgtttctttttttattggaaaagataatatgtccttatacacttgttttaccccttctatggaaaccgtttgtagttttatatctgatatatgtgtaatcactttacattctccctcatttcttattatctattcgtattgtattacacttataaatagataaaatcaaacggaaggatggattttttatatagaaactacaactttagtatgaatatgttagcttctttcattgctagtacagtaatgtttcaaaacaattatgctccatatttcatttttttgattaacactttacttatttttatttttttaagtttcccctgcattatttccatataaaaaagctgcctttccttaaacgaaaagcagcttttacaataaaatacattaagattttacagcaataatcataaatctttttattagttgaaccaatcgggcgtttacgggcagttgatctctcacctaacttcctcgcattttcctaactttgaggtgagagttttactgcccgttaatgcgggataaaccatatttagcaatttttcttattacttatccgcgtaaatagcgattagtacgaaatttgcgactatgtacatacaaagtgcgtacttttcacttgatcccttttagcgaataataaaagcataagttatattctaaagttttttattaaaggagtggctaaaatatgtctattactacattaaaagataagcgtattgttatcattggcgggagttctggtattggattagcaacggcaacacaagcaattaaacaaggtgcacatattattattgcagggcgttcggaagaaaaattaaagattgctaaaaaattaataaatagcaatcatctccacacttacgtattggataatcaaaataaagagcaattacaaaattttttcaagacagttgggaactttgatcatttattcacacccggagcctcttacacacttggaccaattacctctacagaggaaattgctgaaagtagcttcatcggaaagttttggcctcaatattatgccgtaaaatatgccatcccttttctttcaaactctggatcgatcgtgttaatgtccggtgcctttagtcaaagaccaattaaaggtgcgcctgcttacggagcttgtaatagggctattgaaagcttagggaaagctttagctgttgaattagctcctataagagttaatgttgtttctcctggaacgatacaaagagagaatgaacaaaacgaaaatagactagctgcttatgaatcttataaatctctttctcttgtaaaaaggcctggccataataatgaaattgcacatactgttctatatttaatgcaaaatagttttactacgggtaatgtattatttccagatggagggtacacatatcattaaattatttaagacaaaagccccttattacggtggcttttgttgctaatgtaaacattgctgaaatttccaaaaaatggttgcatttctttattaccaacaggttggtttttagaagattcattaaaggaatccattataatccgctcattttgtacatttgcaaataaaattgtgctagtagttgacgaatcaaatcaagaagtaatttatcttgatatttatggataagtttataaagaaaaaaggcatataaataatgccttttttctttatcttcatttaactggataacaaacttctgtaacccacttattaggatcggattccatcgctgggctcacatgataaatattaaacatcgggcctgctaatttgtaaccctctgtctcaatccattttgccgcagcctcatttacagctgtcatctgttcataacttccattaactgttatagaagctacattagtcgattccatatttttaaatgtaacgtcttttgtattttcgtgcttacctagaatacttagctgtatttctatatctacatcattttctttgtattcacgatcatggaaaaccgcaatactataactcggttgggcaatgctaatattttccatttgaatttcttgcattaatacactccataaatcaccttcgcaattatacgatggaataatctttctaacactagctacagttctttctggaatttcttttattgaaacatgataattcatctcaacaacatcctctctcatcgttttcattgagtcttcgaggagacgtaattgtttttggaggttattcatgtcttctttaatttgagcactacgatttaaaaattgctcttttatggtatctatattatcgcattctattatttctttgatggtagcaatattaaaccccatagcttttaacgtttgaatttgatttactttttttaattggtctgctgaataaaatcgatatccactctgctcatcgacttttactggttgtagtaattccactttatcgtagtgtctcaacattcgtatactaatggaagatagttttgaaaaatcccctattttaaacatgatttcctcctataagttacatctactttgaagctcaactttatcttaaacaatgacattgtgtgagagtcaactgtttataacgtttgaattatatttctttatttacttttatatcctcttccttctttaggttataaaaattcactaattgattcgatcgcgactagcaatcaattgatttaccttcatatgaacctctattcttatttctcattaaaaacatatttgcaatataataattacataatgaatattacctattatgcaattatcctctcacttcatgaatcttatccttgtatatttcaaaccactgttgccattcatctttagaaaattctttctcttctccttctaaaacgtaagaaaaaagatttaaacaaatatgccaaccagctatatctctcggtgtatgatctgttaattcatgaatgtactctttaaggaataaaagagtaccattttcctctttatgtatttcaaatcggacacgatctttatcccaagtaaattcaagtactgagtttacttgacactctaaaatatcaatgtttatgaatgaaccgttcatcatgtcgaactttattattccacccgttttaaggctttcaatctgtaaattggacatccattttttcagcttactgttttctgttaatacagaccaaacttcttctgccgtatatggaaattggcgttcaaatttcacaatatatccatcatttagtttcccaatttcagctatcattttgattgcctccttatatagaatatatgttctcattttattttacacgaatataaatgtaaatgtcaagataaacatgtacattttcgcttgtttaagcatgtacaaaatcaatcattttctttgctaaaatgcattttagcaaagaaaatgattgattttgtacatgcttaaacaagcgaaaatgtacatgtttatcttgacatttacatgatgtcttccttatcccattttaagatactgtgtaataaatatgtgattactctgcgggcgagtttattatccaaatcttctttccaagtatttggagggaatcgtttccttttgccatccaatatttcttgataaatttcttctatcgtaactgctttcattgccaatatataaatcctcctatatttgtatttatatttgtacaatatcactatcagaattattatatatatattatataatttacataaaattatcatcgaaaacaacacataaattagttttttctcaaaaatctaattattacacaaataaaaatttatttaaattttctattttttggtatatacttaaaaatgaattattatatttgtatattaggagtgtatttgtatggagaagcttaacaaaagcgatatcattcgcaccgttccacaaaatggtttctttggacatccaaaagggctatttaccctattctttacagaattttgggagcgattttcttactatggaatgagagcaatattactttactatatgtactattccatttctaaaggtggcttagggatggatcacgccacagctgcatccattatggctatctatggttcgttagtttacatgtctggcattattggtgggtggattgctgaccgcctattaggttcaagtagaacaatattttggggtggcgttttaataatgattggtcatctcatcttagctctaccaggcacggttagtacattatttatctcaatggtatttttaatacttggaacagggttattaaaaccgaatgtatctagtattgttggtgatttatatagcgaaacagacactagacgtgactcaggtttcagtattttctatatgggtattaatttaggggctctattatctccgtttgtgattggaacactcggtcaaaagtataactttcacttaggttttggtgtggctgcaattggtatgttatttggattaattatgtatgttcttacgaaaaagaaaaatctaggattagcaggaacgcaagtaccaaatcctttaacagacaaggaaagaaaaaaggtccttatacagtttagtattggtattatcgcaattgcactagttggtgtgttaacaattccaacaggtattttaacgattgatcgatttactttacttgtaagtatcttaggtattctaattccaacaggctactttgtctttatgtaccgtagtccaaagacgacagaagttgaaaaatctcgcttaattgcttacataccactatttatcgctgctacaatgttttgggcgattcaagagcagggagcaatcatcttagctagttatgctgatcaacgtacgcagttaaactttgcaggattggaggttcagtcttcatggttccaatctttaaaccctatttatattgttttactagcaccagtatttgcttggctttgggtaaagctgaattcacgccaaccaagtacagcaaataaatttgctatcggtttattatttgctggtttatcattcttagtgatgattattcctgcatatatccatggtaccgaatcccttgttagcccaatttggttagtcattagttttcttctagtcgtaatcggggaactttgtttatcacctgtaggtttatctattactacaaaactagctccagcagcgttctctgctcaaacaatgagtctatggttcttaaccagtgcatctgcacaagctatcaatgcgcagcttgttcgattatataatcctgaaacagagattatttatttcggtgtaattggcggagtatccattgttttaagtgttattttatatttcatggctccaaagattcaggtacttatgaaagggattaaataatagaactgtgccaaaaacttgttaccatgcaggtttttgtgcacagtttttttagtgctttatcgtatgtaaaactagctccttttaaacgaagaactacaaaggtaaattgatcagaagtaagtcatttatcgatatggatgattaggagaaagcatttacggtaaccccaagtcgagagtattccgatactaatatagtttatacatctaaccctatttaataggttagtgttgaaagatggaactcccgcattcgaaaatgatgtacataagttttccaaatgggcagcttattttttgttttggggttacttcaatatctaagctaaatgcctatggagcaaaactaaaaaaagacgccaaatggcgcccccaacttgggttaatgaggttttagttttccaatctaaagaaatatcgtatcagctcacaaagagagtatatcataacatccaagagaaataatatgcattcttacatatcgaaataaattttgtattcttgcactgacggaccaggaatagcaagatatgaagcatataagcgctgtaaaaatatcaattcatagaagcgattaatttctgatatgacatgttttaatatcacaaaagccatcacgaaatgatgattgcatgatggcttttgttgttttcttatttctttgtctcattgacccatgtaacgatgtcctggatgacatacgcaggaacattggaagggacttcgtattcactagggtgactgaattccccgttgccctccgtgaagatgtgattcaatttcggatattctttgaactgaacattactgcggcttgaaagcccttcttgccatctcgtaaaatcgtcttttacagttacttgataatcacgtgcgccttgcagaatcagtaatagctcttttcgtgatttcacttcctcaactggacgccaacgagtcacatcatacatgaaatgtggagaaggataattataaccagctggtgggtgatttggatcaaaagtaggatccttaatataagcgaattgtttttttagttcattaataaaatccttaggtgccccgaggtactgatactgatcaaggagcatgtcagtaaaaggacgtgcaggaggtgccattaaaatacttcctcttacaagagatgaaggtgctttgcttagtatacgcggcatggtcccagctccttggctatgtccgagaatgaaaatgttacctgggtcaataccttcctgctgcgctgctaatttcgctgcatatatggcatcatctgtagtatcttggtctaatgtagcaggttctgcactcattttaaaaccgtgttctaaggaacgtttctcgtaacgtaacactgcgataccgcttgatgaaagaccggctgcaaggtctctaaagattttagctcccataattgtactgtcacgatcttgcggacccgaaccgtgaacaagaacaacaacaggcactttttcgccaggtttatgttttggaaccgttaatgtggctggtaacgggtatgtagtatttccaattacgatttcacgttcttggtaggaatcaggttggtcataactaggatgcgggatggtataagatttctgttgcatcgtccttacgccaacttcatcaactttgccgccaggcgtgaatttaaggagtagtggaatagtagttccttcgatagctcctggaatttcaaccgtttgatggactaagtttcgttctttaataacaggtgttcccatgcttgtaatcctgctcccgccactttgtgtccaccagttttgtaatatgtttgccgtaaacttggattgaaaagcagcagacgtcaactgaagtgcttctgcatatttaccttgctggagatagtcaaaaaataatgacgtacgctccgttaaagagacttgtttcttttctgcagtttgtgccccttgtgtatccgcatgaatggttgttgtaagcggaaaagaagaaatacctaaaaaaaagagtagggtaaaagaaagtgctgatttttgtaacttcttttttttcatcctgtttaacctccaaaatgtaatggtatgaaatggggatggtaattagtggaatgattccctattggggtttcggtatatgtatgggtgaatcctgcatacatatcataaaaagtccgtatgaaagagtagaagagtccagcaatggatgtttttcatgttacaacggataaggtagaagttcaaatgcagtttaaagatgctgggagtggaacggtggaatggattatgtgcgactggaacacaggtcaaccgttatatcaaagtgataaatggaatgcttatagctaattacaatttataattatcacatagggaatagatactagataaaaagaattaacactcaaataatttcaaagtagtatattgattttaggcaggaaacattcaatacgcatacttgggagagtcgacatatggacttagaattaaaggtaaagaggaaataaatacatactacaaaaactacataatgatgaatatccgtacgactggaaactgggtcgtatagagaatggggataagtttcgtagagaaggtgaagtgaaaataggatctagtttaatagagtaaatgcacgagcaggagttgcttggtacattacacaggtagtcttcatatagaatggaattttatgtaccgattactttaggaaagcattctgtatgcaattcaaacaaatgcaaatcaaatcatgcatttacagatacaaaaaaggagctgttagtaaagctaactgctccaggtcaaggaatctccaaggggaaaagagaaagactaaggactttaaatgagttttggctaatgcctatccgtattattgacggaataatgagttttattcattcgtaacgaaattaatgtgtaagtatgttacaagaatagtccaatacctatccatgcaactcctaatatagacaatgattcgataataattaaacgtttagcctcatcttgttttggtgtagttagtttcttaattagagagaatagtccacttattccgcacaaagtaagagctaatagtagtaaagtacttgtcatcctgatcactcctagtatttggatattcttattgtataccaagctacagactaaaaaatagtaatgttattgtatcttttctatgaagcatgtacagtgtgacgtgaatcttcaatggatagaggtcgtgtaaggtaaccttcagtattagaagtatgaatattgcgtgaaaggaatgcagactgttgaaaatataaaaaacgtatagtacaataagggtgtaagctagattataacgaacaagaagtcgggtggttctgattctcgttctattgataggtcgtaagctttttgaaaagtcttggtttggtcaccaaggctttttttcgtacgcagacaggaataaaagcactgcatgtcgcaatactatatagagtagtaagctgggtttcaacgtctttgcacttcaaaatgatactgcattggtcgtgtgcaatgaaagtatggtcagtacttcaccttggaacccaatcataactacaaactggtcttagtgtcgctacttatagcggcacctttttatttaagaagatgtcttacatattcagttatacccttacctatttcacttttggtaaaaaagtaatgtatatttctaaggaaactgaatgctgtaacgattgtgccaaaagaaaaaagacgcttacgtttcttttctctctctgaacgtttacgggtggttctagtattctccacgttctattgtcacctcctctaaaaagagaagggcaaagacggcacgtattcagtgtacagtgtttgacaaatctctacaagaacttattttctggtatggaacattcaaatatgtaggatcaatttcgagtaagatgtttgaagaaacgtacaaaggttatatgtactgattctcttttactagataaatagtatcagtggatttacgatttttttcatgttgtaattaagataagttaatggagggaattagatggttcataacataatacataatagatttaaactacgagaaatcgaagaaaatgattggaaggatatacatatatacacatcaaagtccattgtgtgccgataccaagcatggggccctaattcggaaacggaaacaaaagaatttgtaaaccaagttcttcaagatgcaagtaaggtcccgagaagtcgattttcttttgcattggttgaattggattacgaaagagtggtaggggcaggtgagattaagattcgagattttactaatagggagggaaaaatagggtataacataaatccagattattggggaatgggacttgcaacggaagtagcaaggttgctgattatatttggatttgaggaattaaatcttcatcgtatttttgcgacttgcgatccaagaaatataggttcgaaaaaagtgttagaaaaaaatgaaatgacgaaagagggaaggattcgtgagtgtatattattaaaagatggctggcgtgattcccttctatacagtattttggaacaagaatggaaagaaatgaactaataagtgtatcctttgcgtaaaagtactgcgtgtaattgggctatttagaggaattaaactataaaagaataaaatctatattctttatgagtgcatagaaaaaagtgagggagaacctcactttaatttttcgttattttcttcttccgctggtacttctcgaatgattttctaagcggcagcacgtatttttcttttgtcatcgtttgtactccttgcataatatcttaagaatgtagaatgtacaatacatgtaactttctatttattatttgaattcggtactgaaaattctagcctatctaatatgtaaaatatgatttctagcaatatagtagataggctagtgaaaatcaaaacagcatgagatgacataaccacgaacgtaatatgtaaatcgaatagcccaaaatactctacatagaatgttagaaaagtagagaccatcgacaaattacatcaaaaaatataatcaaaagcaatgtaagtttgaggtaaagatttactcaataaaaaatagagatgcatgaaaggcgtgggaactaataaattattactaatagatagaaggcattgagctcaaattaaataactttattgttgatttttgagtacaagcacattgatgcaatagtaatttaagagctgcgattgtagctctttttcttatgtagctaacggtgcagttagtggaagaaggattttaatttaatatgatgaaatatgtaatcttctaggtgaaatctaagaaggaggtttaattactataaaaaatgatttgtagaacgaatgtaagggaggaaagctaacttggaaatcacaacagaaagattaattgttagactttttaagagtactgatttacaggatgtatttgctatttataataatgatgatacctaaagaaatacaacgatatatgttacctatagatgtttcttctaaaagtgcaaacaatgaactagagctagcctttgcaaatacgaaggaaggaaaatggttgagggataacacacagcgagcagggtttatcattcgttactcaaaaggtaaggacagtataacaggttatgcatatgaaccttggcatattcgttatgtaggagatatcgctgagagtatatatcaagaaaagctaactttagaagaatatatgaatctaaaaaaataaagaattgatttagcatatatcatgatgaatgcggatgtacggatttgcacttacatgaagcagaaagcatacagaatgaggatacaccgagtggtaaagtaggggaggaatttgacttgaaaaatggctatataaagggatttacaataaattacttttaaacagtttacataacatatctaatagggatttataaaaaacaagtgaataaatctcaaaatgaaaagaatacttatatcattgagacagaaagaaaaatttagtagttacattttgaaatctgcatttaaataatatttagcggaacgcttagctaaaccgactacaataaaaagaattaaaggaaatgctctatttcgacatcacaacaattaaattttgaaaaatacaccaactatttagttttaaggagttaaagcaaactgttttgcattaaaatgttatatattggataagttctataagcaagcatttaatcaatattaatatgtatagctgactgtacccgaaactaaaagacattaatactgatgaaaagtaaggtatatgatagctttataaaagggtggaaaaataaacactcacaacttcgcacgaaataccaattttacgaacaataagatagttaaataaaaatctaatacagtatttaggtattttaagctcgttagcatgaatttctttatatttgtatgtgcctatataattcatgctttatatagaaatcattaaatgctaagttagtcattaatattttttatagtaaattacattttaatttataagattttttcttaagttcatctaattaacccctcataatcatgcttaaattaaccaattcatgttaaataacgaattttaaactgtttttatatattaattttttgtatgaatttatatataaaaattgttttattttacatgcatttatatgtaatttttgcactgaattttatggtcttatacaaatttatcacatagttagctataattttcatttgactaactacactgtaccattcagttttgaacatattttagtatttcataatttaattatgtaaataagtttgtgtaaaaattgaatttaacgcgaacttgtgttcgcctcttttttctgttatattatatatgaggtgatttttatggactacagcaaacaacgtcaaaaatccgtacatcgtaaaaaattatacgaaaatcttaatgaaatgcccttttacatagaagaatttgtggagtacaaagaattgcatgatgcctctccctccaccctactgaattatgtatatgattttagagtcttctttaattggctattatctgaacaagttattgaattaaaacccattaaagacatatccttcgctgatttggagaatttaaagaaaaaagatgttgagaactttatgagatttctaaaactacaacagaatatgcagaattcttctgttaacaggaaaatttcagccttaaaatctttatttaaataccttacctccctatcagagaacgaagatggagaatgttatttttatagaaatgtaatggctaaaatcgaaattcataaagataaagaaacattaaatgcccgtgcaaaacgtatgagatctaaaatatttcataataatgatgatcaagagtttttaaattatgttaagtatgagcatgaaaaatctttaacaaaacatcagttgttctatttcctaagagataaagatcgcgacgtagcaatcctctctctttttcttggcagtggcattcgtgtaagtgaattggcggatcttcgcatggaagatataaacttaaaagaaagactcattgatgtaatccgaaaaggaaacaaagaagattctgtatggattaccccaattgcattaaatgatcttgaaaaatatatggaaattcgagataacaaatacgctccagggaaagaattaaaaaatgtgtttctatcaaaatataaacatactgcacagcctctttcagttagggctatccaagatatagtagaaaaatatactaaggcttatggaaaaagaatgtctcctcataaattaagacatacattggcaaataaattatatatggaagagaaagactcattacaagtcatgcagcaacttggacatacgagtcaagatacagctttgctatatacacaacttggggaaacaactattaaagatagtttaggcagaataggaaagaataaggaataaaagttcagcaattttacattgttgaacttttatctttttacatacttaagatttaaacgctatttattattctttttaaatttgattttattatgtaaaaaatacataatttaaatccttctataattggtatatacatactctctcttgatggatatacatgaaaattttagattcctacaattgttggttacgttaaactcgaatttaatgtgaaattgttttctttgttatcaacagcttctctagactttatatggacctcttatttcccctctactctttcaatataaaatacaaacttaaaattagattacgaataactcttttattactatttatatttataacttgtgtagagcaaatttaagtaaagaatccagaggcaataattttggttctgatgcaaaaacactttactacaaccatagaactgcaatatcctgttaacagggagattaaacagctaatccaaacaatctatgaatgaattcagcttcacttcgggcagatttcaccctttagtgaagttgcccttttttcatcatatgcatagcttcgatgtcacttaaaattaaagtagctgtacgaagtgaattcaatcctaacatagaacgaactcgcttcttgataaaacgatgatcttgttccactatgttattccagtatttctgttgtctaagttgcatactgtcaggtatgcttttcgcctttttcaattgttcaattgctataggataagctggattcttatccaccgtaatgacgcgaggtttagaaacatgaaaagaccgcaaagctttcttgaagaagcgctttgcagcctttgtgtctcttgtttcactgagataaaaatcaatcgtgcttcctttggaatacactgcacgatatagatacatccattgaccttttattttgatatatgtttcatcgactttccatgagtcatttattgtcttaagatgacgccgtactctttcatctaattccggtccatattgatgaacccaacgcataatcgttgtgtgagccatcgataaaccgcacttttccatcctttccactacattacgaaaactcaagttgtaccgcaggtaccatctcactgttaacaaaataatgtttggttgataatgcttccatttgaaaaaacttttccttttccatccgaatcacacaccctttctagagtaatagtatcagtatgtccaagttttatagatttattgtaattattctgaagtttttgcaccagaatcctataaaatgactcaatttcaaaaccactgtttccaattgaagttataataattcattataaaattcttatatttaactgtattgtaacattcgacatgcgcaagctattaatttatatggtaacatttacctgtaagacgaattattaatatgggaggcagatttattatgaaagcaagaaaaccaaaatcatttgtaaaacaatgtacaggaatcgcgttggccagtatgattggatgtagtggtattggagttttcgcaacaagtgtaagtgctgccgaaaatactaatccagctcctatgaaccaatctcttcaagcagaagtgatgactattacacagttacaagatgctattcagcataaaaatgatccttttattaatcaagtaaaaaaatttattgataaacacaaggcagaatcagaatttttatgggggaaagtgagtacttcattgaaaaacgacattgtagacttactcacaggggacaaaaaaaattactctaataaaattaacagagcccttgtaaaacactttagagaagtccctaaattattgaaactagcaagtccagaatttaaaaaagaaattattcagttactaaattacctataagatatatattaagattttatatttcaatggattttgatattagtagttccataaatttgtatttacaaggtacctttcagttaataaaatttatatataaaaatgtataaattaattaggtgtaaggattggaaatagatttaaatgcacatacggtaatcaaatttccatgttttaaatataatctgtcgggtaaaagactggcgcggtatcaattgtgacccgtttccagcctctccccataagaactgctcgtgaggttttccctcacaagcagctcaccccataaacttcatcaaaagggttatgagacctatcaaatggcagacactttcatcgaaaactctctgcacttttcaggggaaggactttccagtcccagtagagccccagtacaccatagagatattcgttactccatctctgccatccgatgctacgctttcgtcttcgtttccttctcgttaacaatgtgcgaattttcatctccgtataatcacgtacttcactgaaagcttgactagagttcccaatccggaagtagttcacccatccagttagtacggcattgatttgttttattaagtcttgtgctggcttcgctcctgcgttttgaatgagttcgcgaatttttgctttcactgtcgtgcgagctttcttcttcgggatcatgaaaacgaagaatccattcttatttcggttcggtattcgtctcaggtcaaatcctaaaaatccgaaggattctccttttaggacattgatcatctgagtcttctccagattcagttcaactcccaaaggctttaactgttcccacagtcgtcgtaatgccagttcagcccatccacttttactagagtgtccgcttacagcgataactatatcgtcggcaaaacggtgatagtttacagcttcgtaattgccctcagctgttttgcgtcgaatggcatcaaatgtccaatccacttcattgaggtaaatgttcgcggctagtggagaaaatggccccccttgcgggacaccgatctttcctgctgccttaattacctgttttacaagatgcataacctgtgggtcttggacacgtttcgcgattttctccaataatatgttgtgtcggattgtatcaaagtagcgtgacaaatcaacatcaattattatggtcatacggcgtaatatactgcgtcgtacttctgccaatgcctgatgtggagagcgtttcggtcgaaacccatacgagtttggacagaaatcagcttcaaaaattgcttctaatatgagttttagcgctccttgtactacacgatctcgtatacacggaatttgcagagttcgcattttgccgtttgcctttgggatttctacttttcgattggattgtggtcggtatattccagcttgcaattcctcttgaatacccgttaagaatgggataactccttctagttctatatcagcaaaactttttccatcaatgcctggagcaccgttgtttttcctcgcctgttgatatgcttcgtgaagggttgtcattttggtaatgtgggtaaataacccccaaaaccggtgcgtaggttcagacttcgcctttcgatagattcgttgccttagttcctgcaaagtgatgggtgtttttgtcatggcacccttgcctcctttagtcatacgaaatgtttacaggttcggaccctttcctccccgcgcgttttgctgcacgcagatctctggtactacgatccgttccgccaccctgacacctaccgttctcacttcccgatcgcggttatagagacggtctcctcgatgaggtttcttcatcgggtgtcgagggcttctccagtttccacattatctttctctccatgtcgccgctgataccccgccggtgagaactgccgttccagactcgtttcggtcagttcttgctgctttcgcacgttatcgaccgtctcagccaccggaattgcgtgtaacgaggctacatctacgttcactgtacgttacaacctggagatttgcccacatgccttttgcatgtgatgtcagagggcttcgccatgtcgctttcacttcatggcgcctctcaggctacgggagtggagtctattcccccgattggactttcaccaactagataatgtgtccttatctggacacgccaatttgccagcgtaaagaataccaatcatgtacttgtcccattgggacaatatctgtaggagtatttgtcatatatacattgataccgctaagtcgtttgctacgagcggaatacttcattcctttctttttttctcttacagtttgatcttgtaatcgtttttgttgttgttcttttgttagccgatgaacaatcacacgagttgggactttatcagtcattcctacataagtgttgaatatttcacatgtttgtcctggttgaagagagttcattaaagcctccatatctatctggatatactctgtacctttcttgattctgccatcttgaaaataatcagggttaggatttttttgataaatacgtgtattcgatttgatacgtgaaatataataagcctttttctcttgtatatgttgaagatctttcaaatgaaaatagcctaaatctcggatacataaatcattcgctgttacagttgggacacacagggaaccgtaggttcgatcatgttgtttacctggacctatatgaatatgaaggaactgtccacttaataaatcatactcgagctgaatctttactcccgctgtatggctgcatcctcctgcacctggataaacgaaagaaaagggatctggaagttgaaatgcagttgaatctaaaatacgaatacgcttgaaaatagaagtatgtggagaagaaatcggcatagatgaggtcaatttttggtttagtagttcagctaataggtgttgtaaaaattggacggccgcttgattaaatcgttgattcaatccctctggactgatgagcacttctgttgatgcttccaaacagctagataattgagttaaagaagtcgtagcgatattttgactcatccatacacataaagcgactaaatcttttgcttggtatttactggttcgttgcacgaaaccaacatctctagcaagatctcgtaagatatttggagataaaaagctttgaatctcttgagcaaatagttgtaattcatcagatatagaaatagacatacaaaaaacgccatcctttcctatgattctacagaaagaataacgtatattttcattttgagggtatttctttttattagcttaatagcgatgggcgggaccccatattgtggaatgtaaaagggatttctatatgatttaacattccaatattccttttagcattttaaaattctgttgataaacctctggagaaccccaatttttgtagttgttaggtactttaatatcttcgatatggtctttttctcgtgcaattacagttaaatcagttatatagtctattaattctaaaatgcggattttcgttccaattgaaccatgtcctggaattgctatctcaacatccatatcgctaaccttttccaaaatgcgaatccaattctcaggattcgattcttcaaaaaatgttggatggcaatcaacaaataataaatcacccatgaatattactttctcttctggaatatagagaactgcatcacaaaatgaatgtccaccacctaatgtgaaaagctgtgcactacgctcaattccacgaaacgttattgcatcacaaaatgttttttgaggtaaaactaatttcaaagttggtaatgaaacttccaattcgcttagaaagtttatttgatgttttaacttagggtcattggtttgatttatttgatcttttaaagaatgaatataatttcttagaccttgtatatcatttttctgcttattgattctcgatggatgaatatccttcattttttcatatgtaacttgacttgaaataatattactttccttaaatgcttggttacctcgaatatgatctccatgccaatgactatttacaacccatgtcacgggtcgattggttattttttctgcaatatattttaaatcttcagcagcttgttgtgtgttaaatgtatcaaaaactattgttttatctcctaaatcaataaagcctgcatttgctacggcaccactgccttctcttgctattgcaacgtatatcccttcactaactttttcaagactaaaatgtttgctgaaaaattccttatccattttcctctctccttgattctcgttttaacgaaatatttcgacattaaagaggaaattcctttgaaggggtatctcccaccaccatcaagttaaaattttataatgcccccaaaacgaaaaattagagtcttttatagcaatgaagttcatttttatcgttttgggggcaacctgttctgttaggttgatgggcatggggtaccgccacatcactatcaagctaagattatacaatatcaagtatagtagagattatttcttttttctaaaagccaggcttaggctgtcttaggacgaattcgttagctaccaaaagtaacgactaaccgagaagcccccacttcaaacagtccgttaggacgttaagtggcgggtagttcacactagccgagatattgttttagtatttctagccctattttcaactcttctaatgagtttgtagaggatagagcgactcgtaaatactgattaggcatggtttgtgctgtaataaagcgctcggaatgaaaaacccgaatgccgtgcctctccaaatctgtttctaattgaaatgcatcataatgattttgaataggtagccaacggtaaaaactaaaaggatgccctacaggcttgttggaagaaaaatatcctgaataaatttcgtttgcagactctgctaaaaatttcttctgcttaacaatttcatgagcttttcctgataacactagctctgttatcacctctacgtctaaagaagatgttttaacattgacattaaatatagcctttaaaatatccttacgtaaggcatctccgaataccatataagcaacccttaatcctgaacaaatgcacttagaagttccactaatataaacactttgttctggaagtaaattaaacattggttgctcataatcagaaataacccctgctgtcaaaaatgcatgaatatcatcctcaatcaaaattatttgatgctttcgaatgattgctgctaactctttttttcgaaaatctgaaatcataatcgtagtaggattagagcaagaaggcattaaaaaaataccatgaatatctaattgactacattgcttatcgagttcacttgggagcattccaaattcatccccttgaatgggtactaattgaatatgtagcatttttgccaattcgataaaatttgaataggtgtatacatcagttgcaattcggtttccaggtttaaacaacgctgtcaatgtaattgctaaagcattttgtgcccccgaaactattgctatatggtcctgatccacattaatgccgaaagacttcatccaattgagacctgccgttttttggtgcggaagaccagttggatcattgtaatttaatagttgctctaaatactgtttatctacgaccttttgaatagtctctgcgacaatactattagtttgctcaaatgatgctactaatccaagatcaatacagtttctgatttcctctgtagaaatagtaatggaacgagttgcattaggagctacaaaagttccactccctgtgattgcataaattaggcctttaacttcacatagtttgtaagctcgggtaattgttgtaaagtttaaatctaaaaaatctgctaattctcgttgtggaggcaattttgttcctggagctaaaaaaccatttacaatatcatgttcaagtagtgctgcaatagaggaataaaacggacgctttaatagttccttattaggtttccaagacatagagtaattttcaaatgaatttactggcatgcttcacctctacgattaaatttttatagggtaaattttaatagttaaaattaagatttataaactttgaaaagtattacaaggataaaaactcagcattattttaaagttagaataacacacttccgctaaagaaaattgtaatacatacaattttcttattcattgtatggattttatgtgttaaatttgtatgcaataaagctcttgattaaggatgtgaataatatgaaaaatagaaatcaaataagaatcgcattccgtgcagcttttccttatacaatacctatttttgctggttttgtatttttaggaattgcttatggaatctacatgaactctctgggtttcagtgcaatatatccaattctaatgagtttaatcatattcgcaggatcaatggaatttattgcagctaatttattactggttgcttttaatccaattcatgcactttttcttactttaatggtgaatgcacggcatttattttatggtatttctatgctagataagtataaaggaactggtaagaaaaagttttatcttatttttggactatgtgatgaatctttttctattaattctactgttgatattccaaaaggtgttgataagggttggtttatgttcttcgtgacactgcttaatcatttgtattggggtataggagccgcaattggtggtatttttggttcccttgtacacttcaatacaaaaggactagatttcgttatgacagcacttttcgttgtgatttttgttgaacaatggatgagggagaaaaagcattatagcgctcttgtaggactgggattatcgatatttagcctaattatttttggtggaaacaatttcataattcctgcaatgattatgattttattagtacttactatcctaaaaaaaccaatagagaacatagaggaggtttccgtgtgacaatgagtttactgcaacaagttataacagttggtatagtggttttaggcacaatgattacaaggttccttcccttcttagtgttcccatcagataaacctactccgcaatatgtccagtatctcggtaaggtactaccttcagctgtcataagtcttttagttatttactgttttaaggatctgaacttattatccggcaatcatggtgctccagaattaatttcagtaggagtagtaataatccttcacatatggaagagacaaatgcttctctccatagcaggtggaacaattatctacatgctgttagtacaattgttttttaattaaatttaaagtgacaagtaattgatcctatcatccttctattttagaaataggatcattatattcaataaactaaagaataagcaatgaatgcattagcatgcgcaattcttttcgataatacagtgagcttcgagaaagattactattagactagttacaacgcaccagtgggctaaatctaattatcaatgttgtctctacttctgtaatattttgtatttaactccagctacaaaaaatatgaagaaggttggcaaatatcttacctcttagttcagagcatattaattttcctaggtaaatacaactttattgttaggaattctccttcgttttgtcctttaagggaatcagaaccttagctctttccaaattctcttagcgtacgaaatttgcgttttgatggcgctaccctatcgctatcaagctaacaagacaaaataccctctaaaatgaaaaaggcgttattctttctgaaaaatcataggaaagaataacgtctttatattaatattgcaacccgtatctaaaaccgcaatagctatgtcctttcctttctcctttttctcccatactaacggagaaaactcatctcttagccttaggaactacagggatagcataatcaatcaaaatccacgaggtttccgtacttagaaatctcccacttaacgaccttacagcctatagaaattgaaagtagtttaattctctaacatggattgcggaacaactttttttcccactactttaaattcaatttcccctttttctccatatattagttctataattggaatagttaccattaattttcccttcttttttctttctgtctctaaatcaattattttcatgtcacaatcccctttatttattataaacaaggagaaagcactcatttgagtgctttctccttgtttataagtggaccttgtaggactcgaacctacgaccgaacggttatgagccgtttgctctaaccagctgagctaaaggtccaaagcgtaaaatttacttcataagacgttttcatatatatcattttaccatataatgtatcaatccactttactttttatttaatatgcatatttacatcgtgttaataatgtttatattctgcaatcctaaccttttgtaattagtactatcttttaatacctttatagaggcctgattaacagtaaaaaattcatatatcaatcatattaaaaatgatatagttacaacattgaattgtttatattttcaaatgcttttatgccatatttctttatatcagaaattgtaactaaattatatgcctgtttcattgtattaaagcaattatctatctcttctttttccataataggtttaccgggatcattatcttctaattctagatgcgcaacttcccatggtaagtcaaatagaatcattttttctaaactcttcccactataacaacctaaagtattgattacacagtctaatatttccttttctatttgagttaattgatttgtactatcataattaacttcaagattgtcgtactgatatactttatatttattaaaaatagctcgatataccgggccatgacttcctacttcacaatcatcttcaaataaatatgtcccagtaagcaccttacaaaatccttgcgcatagtataacagcttttgaagagctaaaggagtaatatcatcatttttatatagcaaatagttagcaacttcctcgattttcgtagtctgcgtagaaggaatatcatcattttcctgtagcttcgcgattgcttctttagagactctatatgctttttgagtaattaaatctttatttctttccaaaatatctagcataaaagattgatctctacctaatcttttcaatatatccgagtactgcttcgtcggaatatctccatttacataccttgttagggtaacctctccccaacctaaaagtaaagacaatggacgttttccaatcttatatttttctaaaacctctcttatttcagaaatagtaactaactgttcctgttgtctataggcatgatctaattgttctaaattataatcatgaatgttaggaacaaatatttcagatttacactcctcgcaatttgcttctttacctacataatgatattgcttccctctaatgactgtcacttttgaaacatctttagtagaatactttaccatatctcgacaaaactcacataaaaccaacataaaaatcctccctcattctaaaaccattagtcacttatctttacctaaaaagataagtgactggtttattccttttatgaaaagaaacaacaatcatgtatttgttcctgttcttattttcaattagattcatcttaatatatatgtctaccgacttcttttgtccccaattatctaactcatattgtggacaaaagatatacaatttttcatgagcaaaatttggatttttattatcaactgcataacaaaaatcacgtactcctatattaagaagaatctctttcactttactagcgttaatcttattagcctctaaaaattcactattctctttccttttttcatttcgagaaaccgtaaatcgattatttttaattaattctttaaactctaatatgtactgctcaatctccccgattgtaaaattagtgtgcttttttgtctccctattttgaaagctaatatgcattaaaattctttcccctttcaaatcgtacctcatatttactagaattacaataaaaaaacgtatcaattgatgcgttttttaaaaattcacagtaaaattctattcatccttcttataatgagtacatttatgtcgtctacaaaacttctatataattatttttgctgcgattcgtaaatctattatgtatctattttacaaccacagtttcatatatccgtgtatacatttaacgtaaaaaaactacatatccctccaatttccctgataaacaaatcaattactcatatgttttctccccctatataaatttcctatcttaatctgttgttttatacagaaatatatatttatacctgtttaaacccaaacaaaaaaggcctcctcaagtcgattaattgtgcatagcaaaataagctaattacactaatcggctcaaagaagccctttcaaaattaaagtaagaaaaaaacttacttctacaactcaaccacaacacataaggtgtgggaatgaacggaatcaaataaactaacaatatacctatatattacaaaatacataggtttatatcaagatattttaaaatatttccaaatgctgattttcattctttattttcttccaaataaaaaagcatataaatactttattctttccaaaactgttccaatagaatgacaatcacggtacccacgagcaatccattccttaaaacatattgtaaggaagaaggaatgccactaaatgcgctttctggaagaaacattattcctaaactgattaataatgtaattcctaatattgttaatcggcgttgatttaattcttcgcttaaaattgattgaaatgaaatgcctattacttggacaaatgttgctaaaagtgcagcattggcaatagggcctggaagcaaggatataaagcttacgattgagggaacaaaagaaattcctgctaatataagacttgctataaggaacgacttcaactttctttgtcctgttaattgaataaatcctgctgttgcaggtaatggtacaataccaattgtagaaaacaacgacgagataatatgtgatatacctccgacccatacaccacggttcaatgtttgcttttcattttctttagataagggagctacttgttttacagctgaaatagcagcaattgtatttgcaactaaaagaaatgtaaataaagttgcagttagggtcattccaatatccaatctaggtgtgccccaagcaaatatctctggtaacttaactagcgttgtatgtgtaggcatataagatgattctcctaaaagagtatacaaaagccaaccacatgaaattccaagtaacacagcgtaccttttcatccatcctgtccctttaattgataagaaagtaataaaggcaaaaacaaagagcgcaataatagctgttggataatcaggatgagttgcagatccttgtaatcccatcattccttttagtaacacaccactaagttgaagtgctaaaattaaaagaaatgtccctgtaactaaaggagtaaataaacgtaagatttgatgaacaagccctgttataccaagaacgaagagtaatatacctgcaataattaacccaccttctaaaagttgcaacacgtcttttgcactttgtccctgatgcatagcaacttgtcccagtatgacaaatatacttacccatgaaccggctggaccatccgctatgggatagcgatgcccaaaccatgcttgtataaatgaacttattcccacgactaaaaaagttcgctgcattaatgttgaaatatcttctactgataaatggaatatgccaccaataatgataggcaatgcaattgcatttgctaatagaaacacaaaccactgtagaatactaaagcttgtattaaagtattttttattcatattattctcctttactgaaaaagaatctcatagtaaaaatccatcctttctacacagttagattaaaaaggatggattttgtaaatctgtaaaatcaatttaattgtatagatagatttttaattaattaccatgcacgaaatggtaagaatttcccattaagtgtaataacgatacgaggatcgccaccttttggatcttcttgtgtatccacacctaaattgaagttaattgcactcattacaccttcaccagctttttctaagattaattctctaagagttggtgcgtattgtaacatcatttcatataatcgatataagattgggtcagtaggaggcatttgcattacttgacctctaagtggaactactgttaatgcctgaactacttcttcatctaattctaatagtttaccgattttttctgcctccggacgtgtcattgtagcctgccctaataatgctgttacaacccaagtctcagagttttcacttacttttgaaatttcttcccatgttaaaccttttgcgatttttgcttccataattttttgcgtagcttcttgtctattcatatttaataacttcccttcatttaagtaatgattaatgtttcataccatttaatgttttatatccatcaactactacatctaatttacctgtgtgaggatcaataactaaaccatgtacaggaacatcttttggaataagtggatgatttcttactaaatcaacattagcttgagtcgaatcacagatatcatcgaatccaaatagccatttttcaaggtcaacaccagcatattcaattgctgctaaaatttctggtgaagctactccacgatctaatattttttgaagtgttcctttgggattagtttggcttgcaccacatctatggtgtccgataagaaagatttcatctgcatttagatcatatactgatgctacaacactttgcataacactatcgaaaggagaagcaatcttaccacctgcatttctgataacttttgcatctccatcgtgtatatctaaagcttttggaagtagctcaattaaacgagcatccatgcaagaaacaacaaccatacgtttcttaggcatttttgttgcttcacggggggcgtatttcttattttctacaaatttttcattgaatgataaaatatcttgtaataacatatttgtaacctcctttaaatctagatgtatttttttgttgcgtcctctgtgttataagtaaatataactaataaacaatgcgatgtaagaggataaacttagtatagtgaattgtatcgataagctgaataagttggcgaaacactttctgcttttctactttcacgatgaaaggattggtttatattattgatcaaacagattttgagatactgaaattattaggagaaaactcaagaatacaatggaaagaactaggtcaaaaaatacatatgactgggcaggctgtaggaaatcgaattaggagattagaggatttagggattattgaacaatatacaatcgctataaaccgaatcaaactaggacaaaccgtgactgcatttgttactttgtttgtcacatcagctaatcatcaagaatttatggatttctttcaaaaagaagaagaaatatctgaagtacatcgtgtaagtggtgaaggatgttatttattaaaaacacatttttcttctaatgaagaattggataactttctaggtcgactattaaaatatgggaattatcgtgttaacctatcaatagggaagttaaaataaagtcttttttcttccgaggggataagttattttctaatccttatttctatagagataataagagccttactacaatttatgtgtagtaaggctctttaaatacttataaaatgctatctaattggcagggactaccacattaaaggtaaccccttttcataattattgacttacttttgctatctcctttaaatatctttgcatattttgatttactgcatagacataacatccatttattccgcgagataataatacataataaatacgtttaatataggatgttaactcctcattatttatatctgttcccttaattggaagaccgtttcgatctttatattcttttggattcactacaatcttagccttatttaaatcatagtctccattttcttcacctgcgtaatcacaatcaatttcagctcctaaaatcacaccaacataatttaaatccgcaccttgtgtagtatgtatacatcctatttcctctatactattctcaaagttaatccaaccttttacctttgagttccatttgaatgtctcacctgtaacaggatcttttatatcataatgatttttgtccttctgtgtaatccatttccaagaataacccgcgactacacgacataattcatgtttttcatttaacattttcatagattgattcaattctgtaatagagtctattaccttaaaatcatagccccgcaataacccttcttcatacactccaacattatttgctatttgtaaatatttacgaagccatgctaaatattgatctccagattttaaacggaattgtttatgtaagggatgcctcttataatttgctgtcaactgctggaatacatctgtatttatatctgctggtcgaattgtttggtatggatcataaaccacagttaagtgatacgcaaatgtttctattaattccaactcagttgtataaccattatcggtgactaaatgttttaaatcacgtgcttgtttaccaaaatattgttttagacgatgtgcttcgtccacaaaaacatatttatattttgtgtccctactttttgcctgcttaataaattgtgaaggtgacagtactgtaatactttgtagacctagtttgttcatcaagctcttatataaatttaatgagtgattttgtggaacaacaagtgctatatccttataattcaatccctctctcactttaccagtttcactgtcataagcaagcgcatataagatgtttgttaatacaattgttttaccagtacccgggtcccctgtaatcaaatgtcgactatttgatgtagtaagcattgtattaaaaatgtctttacaaacctcaatttgattagccgataactctttaaatggtgaatatttataaataaatttattatgtatctcacctaaattctcactagctataccttctttcattaactgagcccaaatttctccaaacatattttcaacattttcaattccattataggaatgaattttttgtcctctgactttatttagtaagttaaatttttcatccgctaataaatattcaattaataatgtttcaatatgtttaattgagctttcattaaataaatcactctttatcacaataacttccttgaatgttttatcttcatcatttaaatgtgcaatgaaacggccataaatatctgtggatttacctacatataaattctttttatctcgttgaatataaactactggtattccatctattttagggtctctaatataaccttgctcaaactcttttcgcttctttttaattatgtaaaatgaagataattttgctgcaaatgatagcatttgaataactccctactttttaattttaataatacttaaggatgtatggatttcatacttttaaaatacaatccatacatcaaatcatgatctcaaccatctgctttctcataagcatttcaaaaaactgtaaaacgattatagttttacagttcgttatattttttattgcttccaaatgctttttctacaggatatttctctgcattcttttccaactttgcatgtactacttcttctagatcaatatttaatttatcacttagcataagtaaataaatcattacatccgccatttcttcttttatgtcctgcattttcgtctctgttgcttcttcactagacttccattgaaaagcctcaagcaactctgatgcttctaaatttaacgagattgctagatccttcgcattatgaaactgcccccaatttctctcatctcgaaattttattactgcattttgcaaatcttccatcaccattaatcccctctcaattacttactatctctttaaaacaaaattcattacatctggaattccatctaattaaccttaatccagatataatcatcttcatatttaacatttaattttaatcgaatccccttcatatagtcctctaatcgtcttgtgaaatcctcatcattgaattgatcatattgatctacgcctaaatataacttaaatatattcccttttgttaaatcaaactcccacttcaaaaaattatgtagcatattttccttactcatgtagcgattcgcttccatataatctagtaattcatatagattatagtataccaagttatttggtttaagcccttcacatttgggacactattctctatatctatcttgtaattgcataatcatttctgtcccacattgattacagttatacatgtaccattcccctttactggataacccaattcgtctctcttatgttcttcctgtccttgaagttaaaaattatactattttcctttaaaaatattcctcttatgccacttaaagtataatttattctccggttgaattcctatcttagcttttggtattaatccaaatttcaaataatctgtttccactattaatgaggaaatatgcagtcgtccctggccatcaaatgtgataaaacctttatcataaagagcatcatgattacagcacagtagtacaccgttatacggatctaagcgttccatacttgtactatctttccatggcttagaatgacttgctcttaacaattctggtaaatttattccgcataatgcacattttccgttccaaatctccattaattcctctctaaatttttgctgtccaattcggattttcgcttttacttcggattccgtctcagctataaccggaattaatgtattgttttctgtccttcttaccggatcaactgccaactctaattgctcatcattgattttataaatgtttgaatcaccaattagttccattaatttaagggctaattcttcattacatggatataaataaccttggtttccatttgcatctgattgaaaaggtgaatatttaattggcaacaggtgcgatatctcttcaaatttctcacgtatattaattggtttttctaactcatgatattttaaagataccaaatagccttcatcattccattgatcatggcttttcataatcgatggtttattcgattccttacaatcttcttcagctatactaactgctacaatattcccttttacataatgaaagattcgatccccctcttttacatccatcattcttttccatgaatgtggtacattaccgcctctatcctttttaggtgaccaaataatttctaatcctttttcctcttgatatgtatgcccctgcataacaataaaatgattcatatactctctcctaaagcgttaactcattacgctattttctatttaatataatactaaaaaactctcctatgattagcaaattgtctgtttcattttcaataccaaacaaccttctctacagaaaaattctgcaattccttttactcaacaattgagaaatccaactttatatccatttataaaaacaaaagagttgacccaaaaggccaactcttctattttaaattttttatttctcttcttcttctttttttacaatttcccgttcatttttagcgattaaatcatgaaaatgttcttctttgttttcttcaatataattcataaggtctttaagttccatttatatcgcctcctgtatttattatatcaataatataataaaatgtcaggataatatctattaattatcttataaaacttaaacgatatatattcacttgaaaacaagagctgatttctcgataaattgattatttctacattcatcaacaataatttcttttactcgttttgattctttaaaagcaaaaacttctggttccttccctgtattatcatataaagtatagcaatctattaaatctttaattttagaaaaagtagtcgctactttcatatggctttcttcaattatactttggggtaccaatcttcctgttactttaaaacgcaaattggatcgctctaaggcaaccttgattggaacatctacaataattgctttaatactaaaacctgctagtcttaattgttgaattaactttttgtattttacttcatttttcattgtaccatcatacatacagtttatttttcttttcatgcagatttttaaaagtttcatggtaatatcactactttcatcatgaactaaaaaagctgcttgttttattaactcaatgtttccggattctattaactcttgatattctggtattttttctttgatcttatcaggatctatccaaaccatgttttgtttctgatgtttatatcccttacttactaactctccaattgagctttttccagcagcagaaccaccaccaagtaatatagcctcaggttcttgctcttgctgcggttgatcatttagaaataatttaatgatttcattatgtaaaagcttacgttctattgtgtactccccattaattacgtacttttctctagttggtttcaattttaattctcctcttctatagatgcattattgtgtccatttaagaatttgggaccttcccctttaactgcgcttattacttcggtattttgaaatctctataggagatttaacttactataatttcatataactcttttagttaggtgctataggcttcagttcatcactatatattccttctaaacaatcatatttctctttagcttaaaacctactttaaacctccacttaaaaaaacaaaaaaaggctcctttaagtcgattaatcgtgcatagcaaaataagctatatacactaatcggctcaaagaagccctctcaaaattgaaacaagaaaaaacttgcttctacaactcaaccacaacacataaggaaggtaggtgtgggaataaacgaaatcaaataaactaacaatataattatatattacataataaaattataattctcaagggtatttgattaaaatattcctacagtgcttctaccgtaggaacatcagcgggtgcccactttaaatgctttaaatccttaatactcatccattttagctctgcatgttcaagagctttaggcttacctgccaagattctagctttatatgtagtaagatgaacaacaatggtttcatactcgcactcaacttcctctaccttctcatctacaacaattgtacatccaagctcttctttaatttcacgaattaatgcagctgatggttcttctcctttgtttatcttaccacctggaaactcccaataatcaggtaacgtcattgtcggggaacgtaatgcacataagacttcattattttcattaacaattaccgcaccaaccactgatacttttctcttcatacctacacacttccttatacagattaattaatacttactatcttatattaattcatattttaacaccaagttttccttttaaatgatgattaacctttcatttgctaatgaaggagccaaaataaagcatctaaaatctctaatatactaaaatttttcgagtaaacaagacaaaatgaaaataaaaaaatggaaaatttgttaacgacaatgatatgcttagatatgtatatttgttacataaatacattaattttattaaatgagaggtgatgaattgcatctcaatattaaatcattacagtattataatttatgagcaaaatctagtatcttagataaggaggttcttaaatgaactggagaaaaatttttggttatcgctctaaaaccgcatggaaaatgtttattgcttccattgtttatatctttattttatttttaatacttcaagcaattattccaaattctatccgccctgcccttgttaatattggttttttgggatttccgttaagcttacttgctttaattattggattaattaaaccacaatttgtgttacccaaaatacaaattaaaaccagaaagaaagtagtatattcatatttatatctagcactagctttctttttaatgggtattgtatttattgatggaaaatcaacttccaatcaaactgtacaaaaggcagacaccaaagttgccacttcacaagatactaaaaaagatacagcagacacaaagagtaaggaagaagctcaacgtaaagctcaggaagaaactgaacgtaaagctcaagaagaagctgaccgtaaggctcaggaagaagctaaccgtaaagctcaagaagagactcaacgtaaagctcaggaagaagctaaccataaagctcaagaagagactcaacgtaaagctcaggaagaagctaaccataaagctcaagaagaagctcaacgtaaagctcaggaagaagctaaccgtaaagctcaggaagaagctaaccgtaaagctcaggaagaagctaaccgtaaattatactgtttaaaagtttgttcatttcaattaatggaaaaccgtagagtttctatccttaagttgatgggcatggagtcaccatatcaaaaaagaaaattgtacgtttagacaaaattttgacatagattaagatgtttgttgtacactaatactattttctggctaaatatggactattttgcatcggaaagtcgatgttctctaaaataccaactaaaatattaaatcaactaatgggataagtgaatggagtttatgaagatatagctttacaaacaaaaagggtttatatacgaaacattggaatatccagtttataaaggtgattaagtttattttataaacgttttttcaataaataccttttacaaacgttcatctttaattaactccaatattgtattcataatcttttctttctttgatatgttttcattttccatcaacttaactccccctctagaatgcattaaatgtcatttaacttcaaggtatcaccttcaatttttaatattaataaataaatttctaaaaagaatttaaaactatctatcaaaaacttttcaattatatatcaaattttattactttaaaaacgcataattgtatattcatattttcaatagtgcgttcccaaccctattgaaaagaaatctgttccataccaataagtagatctctttccagaaaaagaacctgttctcaatgaaaaacaggttcttttttgttcaaaattgataaattatactacaacagtattggttctttaattaatggtaaatactttatatccatagcataatttaataacaaattgatatactcttgatttggctctaaacaatatacattcttcaaatatccttgcgtgtataaacaagatggtatagctactgataactcttctacagattctaataaaggcattatgagctctaaagctttctgttcatcagtagttagattcgtattaaaaaacttctctatatacttctcttgtttcattaacaggatatcgtatccaaaagcttgtaaactattaataaattggtcccatttaagctgatgtggattacaaatatgcatggttttatttactgtattggccttataagataattcagtaatagctaaacttccatagtctacaggcgttaaatctacatacgtattaacgttaggagctatgctagataggcatatcccttttaataatctataaaatgcgttttcattaatattgtattgaaatttacctgttttagagttacccactaaattccccacacggtatatcgtggcacgaactcctttttccattgcttctctgaccattttctcgccttgaaacttactttccaggtacagattatctaaattttgccctctatcaaaattagactcaaagaattcaaattcttttggatcactttcagcctgacctactacacttaaagtcgatatataatgaaaacgtgcctttgtgttcttagctaattccaataagtattttgtagattgaacatttaccttttgaaaatgctcacgttctccatagtgtctaacttctccaccacaatgtataattgactctaccctattctttaaatggtccaattgctttgaatctagacctagattcatcaaagataaatctccttcaattaattctactctctccttcaacttttggaggatttctttaccgaaataaaactccattctttcttttaactttgcaccaattacttgaccctcactttttcttactaaacagtaaatagtcgtagatggtaactgtaataaccgttctaaaatatgtgctcctaaatatcctgttgcccctgtaagaaaaactgcctttggataattcaccatatctaactcacattcttctaatttagttgtttcataaacacgagtcgttttcgtttcattttccatacatgctacattcatatttttctctttcttgaacgatatatcttccatctcttcaatatgagaggctaatttttctatggttctatacttaaagaaatcttgaattttcaagttagggtataacggttttaatttgactaatgctggcataacttttaaagaatgtccacctaaattaaagaaatcatcttttaaacctatagattttacgtttagaacttcagaccatacctttgcaatgtctttttgcactttagtttgaggtttaagtttacactcatctttttgctcatgaccaaactctatttttggcagcttttcaaaatcaattttaccgttcgccgttattggtatttctaacacatgagagtaatatttagggaccatatattctggcaatacatttgataaatgtaaagctaacttatttttctctatccctataccgtccactgttttataataagcttgcagtaacattccatcttccgtttgtgttactacagcctgactaatcccctcaagttgtaacattgcatcttctatttcacctaattcaattctgtgccctctaattttaacctgcttatcttttctccccataaattctatatttccatttggtaaccaccttgctaaatcacctgttcgatataatcttttactattgtcttctgaaaatgggtttgaaataaatgcctgttttgttttttcttcctgcttccaatacccttgggccaatcctaaactttcaatatataattcacccatagcccctaccggacaatgttgcatatatgaattcaatatatgaacctttgtattagaaataggaataccaattggtatgcttcctaaaagattattatcgccttctaaaactggtataaaataatacattgctgaaacggttgcttcagtagggccatactcatttaccagttgtacttggtttttaaaagtattttgccaacttctaatagcatttgttgatgcagcttcccctcccattattataaatcttaaagaacgtatcttttcgcaatccagtttagttaatgaagttgataattcattgaaaaaaactgttggtaagtcagaaatagttgcttgtgtttcttgaatagcttgaacatatgcgacagttgaatagcgctgttcatcacttaatacatatagttccgccccatttaacaaggtagaaaaaatttctgatactgaagaatcaaaactatgagaataaaactgtgttactttatcatttggagagatctgaaatatttcctttctccattcaactaaatttaatactcctttatgcgttaataatgtaccttttggttttcctgttgagcctgaagtataaattacatatgccaagtcatctggtttatttaaaattttcacatcatcatttatagttgtacgatatatatcctctattattgaaaccttataatcacttacattcaaatgatttttgaatttgttactcgttataattctacatgcctcactgtcacgaactatataatttattctatccttagggtattttacatcgattggtatataggcagcaccggcttttaatattccaagcatagaaacgatactattcatacttctatctaaaaatatggctaccttatcacctctttttatacctttttcgagtaaatgttgagctacttgattagagcacatatttaattgtctatatgttaaagattccgtttcagtcgctatagcaatccgattggattgtctatctacttgcatatagaattgctcctgtatattttgaaaataaggatagggtctttctgtatgatttacctttttatataaagattcttcttcctgtgataggaatgaaagattttcatatgctactgttcgttgatgaataaaggcgtccagtatagtaagtaaattttgagtaaacctattaattgactcttccttgaaaagattaatatcatactcaaatgaaatccctacataatccaatccttcttcaacagctaaagaaatgtcaaatttactaatatcttgtttattaggtaacaactgaagcttatacgcatcatgttgctgcagaatatctttctgataactaaacatagtagaaaagatcggattatttccatagcttctatcaggatttatttgttcaattactttatcaaatgggtatgattggttttggaatgaattcaaacatttctctctcactacttgtaatagctgtgttaaatttttaacatcattcaattgtgttctaattgctagggtatttacaaagaatccttgtatttgttcaaattcttgatgattccttccaacaaccggtgtacctacaataatatctttttgatccgttagataatgtaacaattgaatatacgctgctaaaaatagcatatacatagaaacattctcttgttcacatacttgtttcaaagactctttcatttcattatctaacttcatttcaaatactgtacccttatttgtactttgacgattcccactaaaatctaaaggaaggtttagtataggaagaggtgctgcaagttcggccatccaataagatttttccgtatcccaccgacctaaatttaactgctcctgttcccactcagcataatctacatatcgattagagatagttggcaactcaggatttctacgttttgcaaaggcactatataccttcattaattcatctaataaattccttacactccactcatctgtaataatgtgatgtaaattgatatataaataagactttttcttatccagattaaaaattctaatcctaaaaagagggccattttctaaatcaaatggtgtatgatccgtttgatttattgttgtgcgtatatattcttgttgttcttttttagtcatgtgttcaatctcatcgtgaatcaaatcaatcgctattgagtttaaaatgacttgtctaggctccccatttctttcaataaacactgttcgtagcatctcgtgtcgttcaactaaaaatcttatggtgtcttgtaagatatcttttttcaagctcggttcaatatatatgtgtagtggtgtatcatatactctattaatggcgttatacttatttaaaaaccagattctcttttgagcacttgataactgataactttccttatctgcaacttttaatacttgcatctcctgttcttccctatcatgatttactgccattaatttatcgatgtaagcagacagactagcaatcgttgtatactcaaaaatatctctaatttcaatttttagatgaaactctttttgaatttgatttaacacttgcacagcaattaatgaatgtcccccaagtttaaaaaagtcatcatctctgccgattctatatttccctaaatttaaaatttctgcccatgtttttgccaatcttttttctgtttcacttatcggtggaacatattgcttctgcatgtttgaaagtaaagatgggatttgtaattctaatttttttctatctagtttcccgcttggtgatacaggaaaactttcaaggtgaaatacataatttggcatcataaaatctggtaaactttcacttaagaatgtttttaatgcctcttgttttagttctgtattgtcttttgataaataaaagctaacgattttgtcgttttgatacgtgaatactacagcatctctcacttctggatgtttaaataatgttccttcaatttcatccagttcaattcgatacccacgtatttttacttgattatctttccttccgataaattctaaatttccattcggtaaaagacgtactaaatctccagtacaatacatctttttatcatgattataggatttattgaaagagataaacgcctcttttgttttttccttttgatttaaatatccgttggcaactccatcaccgccaataaataactcacctactacacctgacggacataatgtattgaacggactaaccacgaaaacttcattattagcaattggtttacctattgggatattagagatttctttttgtatctcaccatttacttcatacatggttgcacatacagtagtttcagtaggaccatatgcattaagaactggaatctttaaccctaatttactttgccatttacgaactgattcagcaggtaaagtttcccctcctacaaatacacgttttacagaatttaatttaagtaacatttcttttggcatatcagctattaatttaaaaaacgcagttggtaaaaccacatttgtaataccattcttttgaattacatttataaattcctctgctgaacgtttttcgatttcagaaattaaatgcattctccctccacatagcaaaatcggaaatatttccataatggaggcgtcaaaaatgatcgttgcaaattgtaaaaacacatcttcttttcctaaatgaaatgtattgattactgaatatgataaattaactacacctttatgtggtacaacgactccttttggcaaacctgttgaacctgacgtgtagataatataagctgcatcttctatggtatgtgtagacgcaatattttctatagaattagcgtaatgaaaatcttctagataaattgtatgaatcgcaaacctatcaaccaatcccctgtattctttcttcgtaataatcatttgactttcgctatcttttaagatgtattctattcttttttcaggaaactttggatcaattggtacataaactccacctgattttaagatgcctagaatccatacaatggtatcaatctctctctccattgtaatacttacacgttgtccctttttcaaatcattttcacgtaaataattcgctatttgatttgacctttgctgtaattcataataggtaatggatttatcccccattgaaatcgctatttgatttggtgattttaatgattgtagatcgattaattgatctagtgtttttgaatgaggatatgtaagagcatttgagttcatttctttgtatagacgataatctttctctacaagtaaatccaatgaatggataggttcgttcacattcttcattagtttttgtaacaaatatatatatctttcgactaaatcactaatactctctggtttatataatgctgagttaaagtcaacctcaattttattctctgtttccccttcatatcgcattattctccaagtcatattaaaaggatttactcttttacaatctgttaaaactgttgactcaatatcaggaatttttaattccggtatcttcatcgtattaaatgctgtggaatataccatattatgatttgtatttgtatttagatttaaatcttttactatatgtgagtatggattatgtttatacgtaatagctagatgaatagatttattcactttattaagtattcccttaaatgtttctcccttttctattgttatacgtataggtattgtattaacaaagtagccaaaagtatctcgttcttctgtatgtggtctagtattaattggaataccaacaattatctcttcagcatttgtcatttgatgaagtaatgtacaataagtacttaacattactcgataaatacttatattattttttttagcaaaacattgtatttgataaaatagatccgaattaatattcttgcttatatttttatctgtatatctcttttcatttattttattaaaatcaataggaaactctgtaggagttaattcaccttgtaaataatctttccaatacgatgatccttctttatatattgcactatcaataaaacccacctcatactctacgaggttcttataaggagattcaaattctacattcgacttcccttgaagtaattcaccataagtattggataattgtcggatgaaaactcctaaactccatccatcgtaaataatgtgatgaaacattaaatgtaaaataaatgtatcttcactgaatttaatgatgtggaatttaaacaaaggcccctcttctaaactaaatttctcattaactatagattctaagaaattttttaaaatagatttttgttctgtgtttttaaaagcagttaagtccttaattggtatatcaaattctacattcctttgaattaattgctttatcttttcatccctcttcttaaatattgtacgtagcgccggatgtgattgtactattgtagtaagcgttttctttaaaacctctatttgaagatttccttttaactttattataatcggttcattgttcattcctttttctatttccatttgatgagctatccataatgcttcttggcctactgttacatccaattcttctacaatttcatatttcttttgtatttctttcatatgaatttctccttttataaatatttaaaaacggataatatttacagttacaactatatgtacacattctgcaatttgtaaatctatattttccgactaaattcaacatttatttcgcttattgcatagttattaaaattatgaataaaactcatatttatactgtatcaattcatacttttattcaatttaagcataaaaaaccatttcactaataattctaatttctttttatacagcaatcttacatattttattaaaggaaatagtctaatttatactccgaaaataaattcaagaatattccaactggtcactatatatacttcttataacataagctgcaaaggaggagtccgtacataatggaatatagattattaggtaacacggggttaatagtttcagaaataggattcggttcttgggcaattggtggagatgaatggggagcagtaaaagataatgaatcacttgatgcaattgagaaagcaattgatctaggggtcaattttattgacactgctgacgtttatggactaggtcatagtgaaacacttgttgcaaaagctataaataatcgcaggcaagatataatcctttctacaaaaggtggtttaattggtcatcattatgaccccaatcaaccagccgtttatggagatcctcaaaagatcattgatgcgtttgaggctagtttactgcggcttaaaacggattatatagatgtttacttttgtcatatttggtgggataaacctgaagaaacagaagcctttctacaagctttccaaaccttaaaaaactctggcaaagtaagagctgttggtgtttctactaatgatttagattatataaaacattttaatcaggctaatgatttagatgtcgtacaattcgattatagtattttgaataaagaacctgaaaaagacatccttccttatattgaaaaacataatttaggtgctgtgataagaggtccacttaagatgggaattttaactgggaaatttaatcatgaaactcaatttccagacgatgatttaagaaaagattggccaaaagaaaaatggtttaaagatagcttacacacagtagagaaattacgttcacttgtacgctcaaatcgaagtttagcgcaagttgctttacgttatgttttaagtcacccagcagtttcagttgctattcctggtgcaaaaaattctactcaggttgaagaaaactcttcacacttaactcgtccattattattagacaatgaaattgaattcattaaaaaactttgatcgaataattattattccataaaaaaattatgctgatttttctaccaaatccatactactacttcttcccaactagaacatatctttagcacttccaccctattttttatctttccccaacaatttctacagtttataaggtagttgaacccttttattcaactaccttataatacgttttacattatattaaaatatctactacattagttaaatacatgctagggcatcatgcaaaccaaataaacaattaattcagaaatatttttagaagcttcattatctcacaattaatttttttgaaataaatcaaaaaatttttctttactttaaattctataattcatataatcttctatggaattacatttttttctaaatagctcctcatttctaagtattcaaaagggaaattacaaattattacactcttatgtttaaccaagtaaaataaaaatccagtttttcacaaggagaagtgactgcatgcaagatattttaaaattatttccgagcgttgacggaaatgaagaaaaacaacaacttttattagaatctatgcagaaaataattaaaaatcttgaccgattaaaaaatgaagagcgagctactttaggtaaatgtgaggaaaaatcagaaggatactacaatggcttaattcaccaaagtcatattccactagctggcatcactatgtctgaggttatagaagagctaaaccaatttatgaatggccatccttatccaaataaatactacttatcgaacgccgtaccactaccaagtattccgtcattattgggtcaactaaccatggctcttttaaatggtaatggtgtttgggatgtctatggcccaggggcagcagaagcagaagtaaaagttgtatccatgctttcaaaactgattggttataatccgcataatagcggcggttatacaacatggggtggacaaggttgtgtattttcgagcttacgcttagcaatttctaaacaattcccattagcaaaagaatatggtgctccacaaaatgtatattgctttgcttctgaaaatgcacactatagtttattaaaatcagctgaagcaactggcattggatcaaatcacttaattaaagtgaaaacggatccttattcaaattctatggatatagatgatttagaggcaaagatgatacaagttattaataatggtggtattcccctttatattctagctactatggggtcaacagatacttttaccattgatgatataaaaaaaattaaagagagcgctgaagcaatacaaaaaaaatataaattaaaacctatttatatccatgcggattctgcaatgggtggattctatagtttctttaataattataatttcgaagaaaatccactttcatttgaacctaacttaaaaaatgctttactatacgtacaagataaaatgcaatacatggcacttgctgatagtgtatgttttgattttcataaattaggacaaacaccttatgcttcaagtattttaatcgtaaaaaatcatactgatttacaactgatggacattgaacaagatgacacaccttatcttggtaataggtcatatggaagttatcatacaggctataccttagaatgttcacgatctggtagtgctattccaatgtatatcaatctattagcctttggaattgaaggatatcaaaaaatattagcaaattatattcgtgtaaatctattatttagagagaagttgcgcaaggccctccctcaagtcgcaatcacaaatgattttacatatggaccaattacaacttttcgtttctatatgaatggagatggccaagaaaattgggaaaaagaacgaataggccttgcaacaaaggaagaaattgaggatacaaaccgattaaatatagaactatttaattacctaggaaaaaatcgcgatcaagtattttttggtgatacaactcgttcttgtgtagtagatgtaataaacagttatgatagaaatccgatttctacattataattcttttctatctctccatatacaactgttgaatgtatagatgagatcgtagaatttctttatgaacatatttcgattgccactaaacagattcattcatatgtatcataaccatatttgttagcgctttaatagttaaacttaactaaatgaaataaaatttttaatccttttaattactattcactatatcaggaaagaggaaaaacatatgaatatagagctacttgatacacaccacgtgaaagatgcagcacatttacttgcacattcttttgtgaataatgaacctcttgtaagcagtttacaaattccttttgccccttttcacaaaatgtgcgaagaaatgatgaaacaagctgtatctcaagctatgtcatttgtagcaatagaaaattttcaaattgttggagttcttttaacaaaaaaagtaacccagccactaatagatacagagaaagcgattgaactatgcccgcaaatggaacctatttttcaacttttagatacattagagacagaatctattgagttttctcatttagataaagaaaaattggtctatctagatatgggcgcttgtcatccagattggatgggaagtggtatagtcactacccttctttcacatgccattcaagagataagtaaaaaagattttgattttattgctgcttgcacaaataaaatttctcaaaaaatccttaaaaaactgtatacgacctttgaaatgaatgaaatagtgtatagtaaatttctttataaggaagcatatccatttgctaacacaacaacttccttagcagcccaattactatatatacctcaatcccaatttgtcatcgaggccatctaagtttgtgaagaagactagctgtacttgagtgcagctattttttatacagaataggttagtaaaagatattcaagttaacataagtgtcacctttcacaattttaccaaatcattaaaggaatctcctttcccctatcgaattattgtagaggaaaggagaggaatacatggaaattctaggattagatcctcgcgcattagcaactttaggtgcacttgaatacaccaatcgacgcaataaattaattgaagactcggagaataacatatacgagtgtaaagaaataaaagaaatacttcaatcactccctaaagagaagcagattgaggttcttgagaatcaagctcactttgaagcagtggcaaagatgattgaacaaaacaatttaattcttttagaacagatgaaagctctacagctaattcagaaataacaaacttatgattaattaattctacatatgcttccataaataatgtatctttatttataccatcagcctctgtttttacaggggcttttgttctgcgttgattcatattttgaatttgaatcgtttctttcacatgtatgaatagatcttctaataatccaggtgtagactctaactcctgcttttcaatttcttctgttacggcacttataaattcccatagtacttttgcacctagtagttctgctaatcgtttttcacgtatttcaaatgttttcatgttcatgcaaataccccctataatttatatataatgataaaaacattataattttatgtaaaattgcctaatacattttctaagcttacatttctaaaaaatcactacattatcttaaaaatctaacattattcaacacacttcgtgttgttccgaatcaaaaaaaattgtttggactgtaacaccatagaaattagctaattttatttttatattatctcgtgggattctctgtccattttcatacatctgtaatgtactaatactgattcccactgcttttgccacctcttctctggatcttccatttcttaagttaattagattttcagctactctttcataattcatacatcctcacccctaaaaccacatttcgtgttgttaattaaaatataaaccgcacaatttgtgttgtcaatagattataattatcaacttttaaaaattttaattatttaacacataatgtgttaatatattatcaggtgatagaatgaaaacgtttggaaatataattcgtgatttaagaaaacaaaaaggcattacacaaaaagaacttgcccaatcgcttaaactaagtgaaagtacaattggtatgtatgaacgcaatgaacgtcaacctgattacaataccttgatacgtatagcagattactttaatgtatctactgatttccttctagggcgagattctaatgttaaagcggacagaaacaataaagaactagatcaatggttaaatgatataaaacttgctccatcccaaaagcgtgaagaattaaaacgtttttggaattttataatgcaggaagaaaagtaataaaataaacctccaccttcacagggtggaggtattgagttcgagccttttcggggccaggtaatacggtaaaatggcgttctattcaaagttagagcgcttatttttgtccgataatttattcattaatttagccgaaatatttgcgttacgccgccaaactgtatgaaatggcagcctcctataaatttttttcattttccatatttaaagttactactcttcttttaacataaattacattagtttttctatatatatatatatatgtgtgtgtgtgtgtgtattgaatttacttcttatagtttttgttatttaagacatcgttataaggtattatctgcaactaaaaaatagaagcttaaattatatatatcgcaacactagaggctgaaatttaactctatacaaatcgaaataaattcaagtaacaaacaattttttataattgtttgttacttgaatgatataaagtgattcaatcgagaaattcataaaaaaaacgttattccttcctatttagcttatttagaaagaataacgttttttactttgggatagcaatgtgtgacaacacccctctttactacacaaagacaactataaagatagccccttaaataatacagtaatcacataatatcccctcatacatgtctttttttatttttttgagaaatgctgcaacaaaatcttttaaacactcaggaattaatattttttaaaaattcattttctaattctactatattttttttacgagcttttatttttcttacgggcaccccaacatatatataccaatcatctaaactttcttttaccatactcatcgcgccaactgccgctccttctcctattactacatttggaaagataatagaatgcgcaccaacaatggcatgcttttttaaaacaacttttccagctttcacatttttatattgatgtggaatagtcggtcccattaatgtatttccgctaaaatcatcaattgctgcatatacaattgtttttgatgaaatatttgcaaaatcatgcatttcaatccccatttctcctccaaataacgctgtatatgccgctatatgcgaataacttccaattgtaattttaccacttaaaatgcaaaagtcatcgattcttacattatttccaacagatatagcacctggattatatatgctggtttttttacttattaatacattttccccgacagatagaaagccaatttcgctcaactcttcttgactataaaaactattcatctgtggaaaccccatgcccatcaacttaaggatagaaactctacggttttccattaattgaaatgaacaaacttttaaacagtataatttctagctagctttttagaaagaataacgttttttgacacttgggggtagtgcaaattcttaagttgatgggcatgagccaactccccaaacagtgtgaataaatttttctccatttattactgtttcaagtttatcccgtaagttgctaatatggaccattacagtcttatttgaaccgtaaccatcttcattccaaacgcgttcaaaaatttcttctgaactaaatactcttcctgtattacttgcaagcaaatataaaatatcgaattcaatagaggttagtttaatatactctccatttactttaacagtatgattatgtttgtgtatttcaacagagcgaatacgaataataccatcttcattcttttgcgaagtagcgttttggaaagatgatcttcgtaataaagctttcactcttgctactaattctaatggattgaatggcttgatcatataatcatcggcacctgtcataagacctaatattttatccatatcttctgcttttgcactaagcattagaattggtacagtattattttcacgcacttcctgacaaacttctaatccgtttcgctttggcatcataatatccaaaatcataaggtcaacttcatatgtagaaaccttttgcaatgcttcatcgccatcataagctttataaatgttatagccttcatttcgcaaataaacagcaagtaattcaacaatttctttatcatcatcaataattaatatgtttttattcattgtgtagttcctttccttacaaatcatcaacattactataatatcaaacatttatgtacttgtagcgatgattctgtataaaatttcatgtaacgtattaaaaaggagtaaaaagattaataacgaatataaaataacaaggatatttagattctacattataatgaaaggtagttataaggggattttctatgttatgtaatgatatatattcatttactcaaactggaaaaatagaaaatgatattaaagcttttctactaaaatataataaagagtttacatataaacattcaattcgtgtagcaaatgaggcaaaaaagattgcagaaaagtttcacgtagataaagaaaaagcagcacttgcaggatatttacatgatattagtggcatttttccgaacgaggagcggattgcagttgctgaagaatttgggatagaaatagtggaagcagaaagaaagtttcctatgattattcatcaaaaactatcgagagtaatcgcaaaagaaatatttaaagtagaagatgaagaaattttaaatgcaatttgttgccatacaacgttgcgtaaacatgcaacgaagatggatttagtattatttgttgcagataaaatagaatgggatcaaaacgggacaccaccatatttaatagaaataaaaaaaggattggcaaaatttttggaaaaagcagcttttgtatatatttcatatttgtgggaaaggaaagatacatttaaagttatacatccgtggctagaagaagcatactgggatttaaaaggaattgtacagtagaaaggacaaggaaatgcaattaaaagaatatatgaatcaaacatttccaggagttacattagtaccctacttatattcttagtgacaaatgtttatagatttaaaaaggaaaatataaaaactccacagaaaataaatgtatacaataaatatattaagaaaagagatttaagatttcatataagataagaaacgttaccgtttttatttgaagatgaagaagcagatttatattgtacatatcatttttctttaaaatgccttgcggaacatattaaatatgaatcgcttatacaagttgctaatcatgaggatttctttgatttatatcctcgatttggacgaaaaaaagaaatttcttatccaaatgtatttctcataaatgcaacgaaagatattgtcatgtttatgtatgatgatagaggatgtgaagtaattgcgaagaataaagaaataatacgagatttatataagaaatacaaagaatggattccagattatgaatgagaaagtatagataactcatttaaatgacaataggggaagtgaagcgtgtaatgaaacgtattgcaattgtatctgcatgggaaccagaactgacgtatttgcatcaacattatccaagtgaacgtgttgaaaaaagagcagcttgggaatttcattttcatactattaatgagctggaaattatatcagttgttactggtgtcggtaaagtaagctgcgctagttgtgtacaattgttaattagtgagtttcagccagatgagttgtttatgacaggaatatgcggaagtttatcaaacaaggtgcaaaacggtcatattgtagtggcactaagcgcaatacaacacgatgttactgctgctggttcaggggaagatgtttttaatttatataacggtagaacagcacctattgaaacaacaaaatcacttgtaagaagaataaaaaaaatacgatcgtatgatccgatacatttcggcacatttttatcaggagatcaacgtattcgtagttcggaaatgagatatttactccataccgtatatggagcattggcagttgatcaagaagtagcagctttcgcctatgtgtgtcaaataaataaaaaaccatttctctgtttaaaagctgcttcagatcaggctaatgataaaacgaaagaagaacaaaaaatctttaaaatgctagcatgcgaaagagcatgtgagcatttaattgcttttttgcgtgtttatgagattaatgtagtaaataatagatagtttgttataaaacaaattaaaagtgagttatatgtagggaaatgtccgttcatttcaaattaagagctgaaatttataatagatggaatatattatatgggtacacgttgaggttaatacaagcaattggagggcaattttatatgattcaatataaaaggtgtagtgaagtaaatattgatttagtatatgaagcttttaaagatggattttccgattatattattaagatggaagtttcaaaaggggattttatacaccgttttttgggaccagaaggtaatttgctagaacattcttttcttgctttagaagaaggcaaatctgttggcgtaatactaggtggcataaaggattatgaaagtataaagactatgcgctgcggaacattagcggttcatcctaattaccgcggtattggtgtgagtcaaaaattatttgaactgcataaagaagaggcgattcaacatggatgtaagcaactttttctcgaagtcattgtaggaaacgaccgagcgattcatttttataataagttgggctatgaaaaagtgtacgatctttcttattataatttaaatgatttgactaaaataaagaataaagtttgtaaggatattgaagtaaaacaattagaatttccaacttttaaagatgaaattcagaaatggttaaacttccatataaattggcaaaatgatattgattatatcaaaaaaacaaataatgtattttatggtgcatatgttgataatgacttaaaaggctctctatgcgtaactgaacaaggtaaaattagttttattttcgtagacaaaggttatagaaatattggtgttgggatgaaattattacaagtagcaagagaagaattaaatttatcaagtttatcaattgggtttcctaacaataatttattagagggtttttttaagaaatgtggatttgaaaagaattctttagcgcaatatgaaatgtatttattactctaagagcggaaagatttattcttttcgttttttattttgctgttatgttggtaaatgctccgcaattataatttataatgagagggattttgtttatccttaagttatttttttaattgtcaatttcttgctaataattttctttgtataatattctaattttatgtagaatagatacgatgggaggggatgaaatgaataatggattaaagtttaagatttttgaattgcattgtctcgttcaaaagacttattctgatattaaaatagcatgtgatattgctatttatcaagaaaacacttctaaatatttaatttcattaggatttttaaataaatcatatatgacttatttagaagcaaaaagattctatcgcgaaaatgaagagcttgtaagtgtagaatttgataatttttttgatatgtatgataaattagaaaatgaattaaaacaagttatttcaactgaagataaaaatccttcatcgcttcataacagatttgatcagtttcagcagaaagttgaaaatataaatgacctaataaaagtattgcaaaatgctcgttaatgaatgcttttttcttttttgtatagaaattatgtattaaaaacattttagggatattatatattgaagaggtggcttttgtagattacaaaagtcatctttttatgttaggaatagattgtatacattttagcagtttcatataaataatagaaatttatacgaggtaaataccatgagaaataaaaaagaaatagctatagttgcattaacaacaggatttgttttaacaagtgtaacaccatatagagtaggtcatgcagaggaacctggtcaaatgcaagttgaaattcaagaggattcgttccgtacaggtgatcttacacaaccatcaaaaaaggcgccagagaatgtagtgaaagatgcacttaaggaaaatacggagcatgctttgtctccaaaacaagttagtgcagaaacaggagtagattacaaggttcttcaaaaacgtggttcttatgatggaactacacttgtgcgcatgcaacaaatatatgaaggaaaagaagtgtatggccaccagttaactgctcacgtagataaaaaaggtattattaaaagcatttcaggagctagcgcacaaaatttaacacaagaagatttaaagaaacctattaatttatcaaaagaagaagcgaaacaatatatttataaaaagtacggaaacgacattaaatttatttctgaaccagaagttaaggcggttatttttgttgatgaaaatcatgggcaggctagcaatgcatatcaagttacatttgctgctacaacaccaaattatgtatctggaacttatttagtgaatgctcataatggcgatatgttaaaagatatggtacaagaatcaagtttgaaaataagtgaagagtatgttgaatccgttaaggaaaataaaactagcaatttcacatcattaactggaacaggaaaagatgatttaggcgtaactcgtacatttggtatttctaaacagaccagtgggaattatgcgcttgctgattacacaagagggcaaggaattgagacatatgatgtaaattatagagatattacaaatgaagaaagttattatcctggcatactagcaactagcgcttcaacaacatttaatgatccaaaggcggtaagcgctcatttcttagcaacaaaggtatatgatttttataaagaaaaatataatcgtaatagttttgataataaaggaaaaaaagtagtttcagttgtacatgcatgggattctggaggaacaaatgatcctgaaaattgggagaatgcatttagtactaatattaataacatcagtatgcttttatatggagatcctatggtaaaagcgttcgatatagccggtcatgaatttacacacgcagttacatcaagtgaatctaaccttgaattctcaggagaatctggggcaattaacgaggcattatcggatattatgggaacggctatagagaaatacataaataatggggaatttaactggacaataggagagcaaactggatcgacttttcgtaatatgaaaaatccaactgcaattaatttttcagaaggactaccgtatcccgatgattatagtaaatataatgatttaaatggagaggattatggaggcgtacattttaattcaagtattattaataaagttgcgtatttaattgcacaaggtggtactcataacggtgtaaatgtaaatggtattggtgaagataaaatgtttgatattttctattatgcaaatactgatgaattaaacatgacttctgatttctctgaattgaaattggcatgccttaaagtcgcagctaataaatatggaacgaactcaattgaagttcaagcagtccaaaatgcttttgatgcggcaaaaattacaggaacggtgaaagaaaacgaaaaaacagcagaaaaccaagctccagagttaactgtaccgtttacgattacactacgtgtaggtgatacgtttgatccaatgagaaatgtaaaagctgttgataaagaagatggtgatttaacaaataaagtaaagcataaaggcgatgtagatacttcaaaaccaggtacatacattgtggaatacttggttgttgattctcaaggggggaatgcaacggctacacagactgtaattgtagagggaaatggcgaaacatcagatttagaacctaaattaacagtgcctgttggagcgacaattcatgtaggagattcatttgttccaatggcagaagtattagctatcgataaagaagacggtgatcttacttctaaaatcaaagttgatggtgaagtagatacaaataaagccggtacttacgtattaaaatacacagttacagattcaaaaggccatgaagtaacggcgaagcaaactgtaacggtcaaagttagagaagaagttaaaaatgataaaccaatactaaaagtacctgctacaacttcaattactgagggtgatcaatttgatccgttgataggagtatcagctactgacaaagaagacggtgaccttacttctaaagtagcgtatgaaggaactatagatacaaataaagccggtatttatgaaataatatatagtgtaagagattccgtgggtaatgaggtaaatacgatacaaaaagtattagtgaaagataaagaaactagcaaacctaatggtcttgctaataagacaaataacaataatatctcaaataacagtaataccgataaaaaagaatatacatataaggagctgccaaagacgggtgtaagtacaactaacagtgcagcaatcggcatattgatgattattgcaggtacagtactcactttgattcgcaaatttagaaagatacaaaaataatagtagggatcattcgtttgaagaaaagagttcagtattcaaaagaaataaagtagaaagtaaataaaacgaaatatggattttttacttattaagattttaatagttaagcggtacatttggcttttataaaaatttgcagttggatactattctgtctacagaactatattacataaaaaacacgttactattctcattaaaataaaagaatagtaacgtgttttttaatttgaaaatagtataaatcctatagctcatgaatataggagtacttctaatttgccattgataagttactgaaaacactttgttttaatggaagtgtcactctaaatgacaacatgagatttccggtatttaccaggtgtttcattggtgaattttttaaaaattttagtgaaataactttgatcgctaaaattaagcgaagcgcatatatctgataagggataggtggtgaaagttaataatttctttgcttcttcgactcgttcacgttgaatgtactcaattaatgaaataccgacttcttttttaaataatatagataaataatctgaattcacatttgcaaatttagcaagttgtttaacagatattggattgtaaatatttttaaaaatgtagtttttacaaatagcaatagtctgtgaatgttgctgtgttttttgtgcctttacacggtctgcaaaggtacaaaaagcattttttaataaatcccaaacagattctttgtcttttaaatcttctgttctttgaatatgtaaatcataaattttgtaagcaatcccagatggaagtcccccttttatcgcatatctagtagcgagcgtgatggatgaaatacaaatgtttttatgacgtcttaattgatggaatgaagataaagatgaaagagtctcttgttggaattcgtaataatatttgagtacggtttctttatccccgtcttctatagaactaagtagttgctgctctatatataaattatgataaatggattcgtctttttgcattgaaatatatacatcttcgtttaagatgctgctatgacttatatgaagtgagtcactgttatttgaaaaggtgcttacatctgaattttttttatagagaatgttatagaacaatatcgctatatttacaaagaaattttgatctttgactgacaatgaaaaataatggtctcttgttcttttataatttggaataaaattaaggttactatccgctttacttgtagaaaaatttacatgtgtcaagggcccaataataacagtaccgttcaccatataatcgctctttatgtgaattaaaataaagtgccctagatattcgtgagttctgaagatgggggaattatatgtatcatttctctgaaaaagcatatgtaactgttctatttttgatgtatataacgaatgtgaatcatttttggatttaaattctaaaagaatatttttgttacaatctaaaaaacaaactggaatttcgaaagattgaaaaaacatattgcaaatgtactctatctcaactagactgagttttttagtcatattcttcctccttacagttatgcgtaatagttaaataaacatatattcctttttcataagtagatacggaaaacctttatcaataaaaaatataaataaaagttataaacttctaagaataataccataatttaacatgaatagcacatattatttgaatatacaggtaatagttttggacagtaacgtaaaatatgaatcgtcacacttatttgttggttattacttatatgtattaaaaaatgattaagattggattttaaatagggataggaagtgagatatgaatagattgacagtaagtgactagtcgaaattagcagtgaaagctattatgtaacaaatgtaatgattcttgaaatagggatatacgtgtaatttaggggagaaaattacatatatcatgtggagagacaacgtaataatagaagataagaaaagtgaataagtgattgtaaacaatggattgttggacgactatgttttatgttattcgtttaaatctgatacttggcacactattgcttttaagaaggtaatagtaataaagaaatttttaaaatgatagaagtagtaaaggggataagagaaatgaaaaaaatatttagtgtgcttttagtgttattcttaacattttctacatggtctagtgtattagtaaaggcagattcaccatctaaaggtactttaacgattcataagtatgaacaagaaaaagatggagcgcagggactagaaggtgacggttctgcaaatcaagaggtgccaaaagatgtgaaaccattaaaaggtgtaacgtttgaagtgaaaagggttgcttcttttgaaaaaatttcaaacgatgggaaaatcgtaaaagaagacgtgaaacctgtaatgggagccactccaaatcaagtagtaacagatgataacggacaagctgtattaaaagatcttccgctaggacgttatgaggtgaaagaagtggcaggacctccacatgttaatctaaatcccaatacgtatacagtggatatcccattaacgaataaagagggtaaggtgctaaactatgatgttcacatgtatcccaaaaatgagattaaacgtggtgcagtggatttaataaaaactggtgtaaatgaaaaagcattagcaggtgcagtattctctttatttaaaaaagatggtacagaagtgaaaaaagagttagtaacagatgctaatggtcatattcgcgtgcaaggattggagtatggtgaatactatttccaagaaacaaaagctccgaaaggctacgtaatagatccaactaaacgtgagttttttgttaagaactccggaacaattaatgaagatggaactattacttctggtacagtagttaaaatagaagtgaaaaacaatgaagaaccaacaattgataaaaaaattaacggaaaattggaagcgttaccgataaatccgttaactaattataattatgatattaaaacattaattccagaagacattaaggaatacaaaaaatatgtggtaacagatactttggataatcgtttagtgattcaaggaaagccaatcgtgaaaattgatggagcagaagtaaatgcaaacgttgttgaggtagctatagaaggtcaaaaagtaacagctacagtaaaagatttcacaaaattagatggtaaaaaagaatttcatttgcaaattaaatcccaagtaaaagaaggagtaccatctggttcggaaattttaaatacagcaaaaatacattttacaaataaaaatgatgtaattggagaaaaggaatctaaacctgtagttgttattccgacaactggaataattgagttaacaaaaattgatagtgctaataagaataaattaaaaggtgcagagtttgtacttaaagataataatggaaaaatagttgtcgtagcaggaaaagaagtaacaggtgtatcagatgaaaatggtgttattaaatggtctaacattccatatggagactatcaaatttttgaaacgaaagcaccaacatatacaaaagaagatggtacaaaagcatcttatcaattattaaaagaccccattgatgtaaagattagtgaaaataatcaaacggttaaattgacgattgaaaataataaaagtggatggattcttccggtaacgggtggcataggaacgactctttttactgtaataggccttacgttaatgcttacagcggcatttgttttctttagaaaaaagtttgctagaaattaagattttaggaacatgtaactatgggaaaaggggagaagcaaaatgcttccctcttttcgatatttaagcatatacagaggtggaaatatgaaacgaaatcttgttttggggggtatttttttatttggattaggtatttttttatatcctactattagtaattggttggcgactcgtgcacattattctgagattagctcttacgataagaagattaaagcattacaaaagaaagaagtcgaacgtagggaaaaagaagcagccgaatataataaacaagttcaaacttctgcgaaaacatttacagatccattttctgaaaaaaaaagtaatcatcaagcgtatgctgatgtgttaaatttaggagatgtaatggggtatattgaaatatcgaaaattaatataaaactgccaatctatcaagggacctctgaggaagtattgggtcgcgggataggtcatttagatttttcttcgctcccggtaggtggagaaagtacgcatactattttaacagggcatcgtggtttaccatcagcaaaattatttacagatttagataagttgagcaaaggagatcttttttatattcattctttagacaaagttcttgcttataaagtagatcaaattaaagtagtgttaccacatgaaacggacgatctacaaattgtagaaaataaagattatacaactttaattacgtgtacgccttatggagtaaacaccaatagattgctagttcgaggtgagcgcgtggagttaaacaagaaagaaaaacaaaaagtgagtacagagatatttatatttaataagtggactgtaatagttacaatcctattgttatgtgtgcttctagtcgtaatttataagaaaaagttaactcgatagaatgtatttatcctgcattaatgggaagtgggaccggaaattcaaagataagtaaagacggtatataggggatgaagtaaatcatcattaataaaaattcattttattcgattataaaaaaatacggtaaaggtgggaacaaaggaattgaggctacgattaaagctggtaagtattcattttattgttttgttaatgttaagtgtaagttttgtcgtatatgtaccaaaagaagcatatggttccacgactaccttagaaggtctaggagatatatcgcgttataatgctgttgtctttggtaaccataaagcaataggtggcgacattgaaggagcaattgcagttcaaggtgatatggatgcatcggggtatacgattgtaggtgcagcagcaggaacatctaatatagtaggtgaaaaatgggttgatgagggatatccgtccttgttattgtctggaaaactaaaaaaatcaagagaagaatcttttatcattcaaaacggaatagtcgtaatgacaaaagagagtgatccagatcgcatcatacaatcttcttatgatcgtatcgtttataaagaaaaactagaaattgacgcgaaatttaatgaatttcgcaatatagtgaaccaagttagtaaaaatgcaggtcaatataaaacgaataccccaattccaaatatgagtcatggaatcggaaaagatataaacaatcctaatatttatgtttcatcagaattgacagggaaaatcagtgtagatataagagatgtatttttgcccaatgctaaggacaaagattttattgtaatgtattcagatgcaatagaggttacatttaaaaatgggtctattctatatgacacgaacaatattggaaaggctacagatatagttcctacatcacaaccatattcgcctaattccccgtttactgagctatatgggaaaatgatttgggtttttccaaatgcgaaaaaaattacaacagagggatatggtgtagttgggagtgtgtttgctcccaatgctgtattagaaacaaaaggcggttcgattaatggacaagcatttgttggtgcggtacaacaaactggtggatttgagtttcacaatttcaaatttaactggaaacattggaacaagcctagtacaggaaaagtaaaaataaaaaaggttgatagtaataatgataataaaaaattggtgggagcaaagtttaaaattgaagatttaaatgggaaaatagttggagaactagtaacaaatgaagaaggagaagcgatatcaaaagacttaccaataggaaactatactttagtggaaaaagaagcacctaaaggttacgaattatcaaaagataaaatagctgtaaaagtagagaaagatgcagaagtagaaattaaaataggaaataagaaattgccagatccaatgggaaaaatgaagcttgtgaaagtagacataagtgataaaaataaaaagctagcaggagcaaagtttaaaattgaagatttaaatgggaaaatagttggagaactagtaacaaatgaagaaggagaagtaatatcaaaagacttaccaataggaaactataccttagtggaagtagaagcacctaaaggttacgaattattaaaagataaaataactgtaaaaatagaaaaagatgcagaagtagaaattgaaataggaaataagaaattgccagatccaatgggaaaaatgaagcttgtgaaagtagacataagtgataaaaataaaaaactagcaggggcaaagtttcatatagaagatgcaaaaggaaaagtagttggagagttaataacagatgaaaaaggagaaataatatcaaaggacttaccaataggaaactataccctagtggaaatagaggcacctaaaggttatgaattattaaaagataaaatagctgtaaaaatagaaaaagatacagtagtagaaattaaaatagaaaataagaaattgccagatccgactgggcaatttgaaattgaaaaagttgatgataaggatagtgaattaaagctaaaaggcgctgtatttcaagtgttagataaagaagggaaagaacttagtagattaataacggatgaaaaaggaaaggtaatttccaaccaattagcaattggtaagtatacgattaaagaaataaaagcaccgaacggatacatgttacttagagatccaatagaaatagaaattacagaagcagtaaagaaacaaaaaataacagtgaaaaatgcgaagaataattgggtaattcctaatactggtgggagcggaacaacaattttttacgtaattggtattatgctaatgtttggtgtgctatatttctgtaagaaaaatcgtatattatgaactgattttatagagttagacagattgttgcgttagagagtttttagggcatgagttcggtattgtactggactcatgttactacatttgttgaaggaggaaggataatagtaaacatagaatatattaatgaattaaaatgtttaagaggtgaacatggtggcaataaaacaagacgaaattaaagtagttgtcggagctggagtgtttaataataatccaggctggattcaaacgcaagaagatgaacttaacttactagataaagctacgtgggaagaaagatttgaatacaactctatttcagctattttagctgagcatgtatgggaacaccttacttttgaagaaggtgtaagagcagctgaaatctgttatgaatttttaaaaccatctggtcatattcggtgcggagtccctgatgcattctttcaggatgaggtatatcaaaatatagttcaaatagggggacccggtccgaaagatcatccagcagcaagtcataaaatcgttcataattataaaacattaacgaaaatgtttgaaactgctggattcgaggtagttttacttgaatattgtgatgaaaatggtcagttttattacaacgaatgggatgcaaacgacggtgttattttccgttcgaaaaggtatgattctagaaataaaggcgataaacttggttttccatcgctaattgttgatgcgattaagcgctaatcattcaaccaaaaaaggagttaatcctatgatttcataagtcgcaaatgcggcttttttatttgtacgtaaatctatatttaattttcaatactatataactcgatttagaaaatatttaagtttttctcagcgtcattcactttaaattaacacttcgttgacataaatatttattttatatttatattataaatgctaacttaaatatgtacattaacgcttgaataaatatgtacattttcaattggattctccatactgactagttattgttgcttaagataaatttcagcaacactctcacttcacgtctaaacgcttatagagaaacgtgtcgcgcctgtagtactccactacatcagcaccaactactccagtctcattatctgcaaagcatcttgtcatcggtgccatcactatacgattacgaagagaccaagctccaacttgaattggatcaaacaactttgtttcttcaacgttttcaaaaaatcccccagcatttacatttgttccttcataaatactcgctgctttattacttgaacttgtcatttttcttcccccctaaaaaatcttactataatcgcatcatacttacttttagatagtaacgtcaatttttacgactttataacaaaaaattcgaatattcaaaaacaaaacactgcaaataatattaaaaaggtttccttaggaggaaaccttttttgttgaccatatatggctgtcaattcgtttatctctttaataaaaaacaccttatcaatagaagtgaaaatggttcagtattcttctaaaaataataacttatatacctaaaacaatgaaagccctacctctctttcatccttacggctcctcgtccgtgccagtgtgaatcaggattgcaaaaatcaagtaactattttatcgaagtattcaattaaacttcgaacattcataaatgaaattaaaaaataaaaatggatttgattgtagtaataacaatagaggtaatgctctaaaagtggtttgaaagagttgaatgtctttgaaatgataaattttctataattatgttcccaaaaaattcaagatcttttttgggatataatacattatttgtaatgaaccttaacaaaagctttttatctgattttctgtgataccttcaattaatcccagttcactaatcaaaaattcatatgcgttatctaacatcttcttttcgcttgcattaagtgctttttctttctgtatacgcattaaatcacgcacaacttcagcaccttcttgcattttacccgtctttattttatcagtgttcaatttatacctttgtttccacgtaagtaatctatctgattccccatgttgaaaaatatccattatgtgtgctaatgcggttatatccgtaactggtcgtatattcgaattcaatattctccctgctggaatcattagttccatattactagccgacatttttataacataatactgttgtttttctcctgagatttccttctcttctatggctttaattatacctgctccctgcattggataaacaatattatcaccaatttgaaacaaataatccacctccatatatggtaaccttctcaagcttaacatacttttagttttttagcaaaatttttattttatcataaaattattttacgagtcaatacttcagaagcaagaaattaaatttacacaatacattataaaaatcgcaattccattaacggttccacacacattcattctcctttaacacaaaaacacatcactacatttaagtagtgatgtgtttttgataaggcataaataaatatctacttttccgtctatatactaacctgtttgctaactgtttccctcgctaaaagaaaactcataatcacttgcgctgctactctactcgtcatatctctgaaatcaagagttggatcaatctctactatatccatcccttgaacgagcgattctttaccaaggaattcaatcgcatctagtaaagtcgtactatccatcccaccaggcccaattgctggacaacctggtgcaaacgcttggtctagcacatccatatcaagagaaatataaatagaagtcacaccttgatttcttaatacttcaatactttccgtgataatatcttttatttctcgctctcgtacgtctttcattgtatacactgttacaccatgctctattgcatattcatggtacgcacgtgcattagaaaaattacgaattccaatttgaacaagttgttttccagtaatgacatcattttctagtaaactacggaatggtgtaccatttgacgggcctccatcatctaaattacgtaaatcatgatgagcatcaaattgaataattccgacctttcctttactgtttgcaaaacctgttatactcggaaaactaatcgagtggtcaccgccaagaacgattggtatcacgttcgggtttactttcgttacatgcccaactgttttcgcaattcgtttatgactttcttttatatccgtcacatgcatcgtaatatcgccgcaatcatataagacactttctttcatatcgtgttcttctgtaattgcatatgtgctatatgcatctaacatcgcacgaattgtttttggcgcaaaactcgctcctgaatgactaatagacggtttagaaaggggtgctccaattaaggcagcaccgaatatttccacaccttcctcccaatctttaatcatctcactccatttcgtcacttcacgatcaataaactttgcatttttctttaaatagtggccgtgctccacgattgttcacctcttgtatatgcaatattaccattcttccatactgtattcacatgacttacgccgtaatgatacggtacgtaagcataattgtaagcatcccataaaactaaatctgccttacgaccaactctaattttcccagctacatcaccacggttaatggcatatgatgagttaaccgttacggcattccaaacttcttctggtgtcattttcaattttagcatcgcaatgctcataataagctgaatattttcagttggacagctacctgggttaaagtctgtagctaacgcaactgcaacaccttcatcaatcattttacgtccacgagcaaagctttctttatttaaatagaaagttgttcctggtaataaagttgctactgtattagaatttgcaagcatttcaattcctttatcagaagcaccaactaaatggtccgctgatgctgcaccgatttctgccgctgcttccgcaccaccaagagggtcgatttcatctgcatgaattttcacatcaaagccaagctctttcgcttttaataaaaattcttttgattcttctacagagaacacacctgtttcacagaaaatatcaacgaactccgctaattgcttctctttcatttctggtagtaggtctaacatccattgtaaaaattctttcgatctacctttatactctttcggaactgcatgagcacctaaaaatgttgaaactaaatcgatcggatgctctttttgtaattgtgctgttgcctctaattgtttccattccgtctcatcatctaatccgtaaccactcttcgcttctacagtagtaactccgaaagatagcatacggtctaaatggaatttcgctttttgaacaagttcttctttcgacgcctgtttcgttgcatttacagttgaaagtatgcctccgccttgttctaaaatttctaagtacggaactccttgtagttttagtgcgatttcattttcacgagatccaccaaatacaagatgagtatgcgggtcaacgagaccaggagaaaccattttcccgccgcaatcaataacttctctcgcttgtaatcctttcgcttcttccgctgttccaacgaaagtaattacaccattttcaattccaaccgcaccgttttcgataacaggaagcgtgttcatcgcttcccgtcttaacaagccatcttcttgatccattgttagtaattgaccgatatttattagtaaagtgtccagcatgttttctcctccttatttcatcatcggaatgttaacgcctttttctttcgcagtttccacagctaagtcataccctgcatccacgtgacgaacaacacccataccagggtcagaagttaatacgcgctcaattcgttttgctgctgcttctgttccatctgcaacgataaccattcccgcatgaagtgaataacccataccaacgccaccaccgtggtgaacagatacccagcttgcaccgtttacactattaattaatgcatttaaaattggccagtcagctactgcatcactaccatctttcatcgcttctgtttcacgatttggagatgctactgatccacaatctaaatggtcacgaccgataacgattggtgctgataattcaccatttgcaaccatttcattaatgatgcgaccaaatttcgctcgctcaccgtaaccaagccaacaaatacgtgatggaagcccttggaattcaacttgttgacgtgccatacgaatccagttacataaatgttcattatcagcgaactcacgtaaaattacttcgtctgttttataaatatcttctggatcaccagaaagtgctacccagcggaatggtccttttccttcgcagaataatggacggataaatgctggaacgaatcctgggaaatcgaatgcatttttcaaaccttcatcgaaagcaacttggcgaatgttatttccgtaatcaaatgtaattgcgcctttttcttgcatagcaagcattgcttccacatgttttgtcatactttcttttgataattgtacgtagcgttctggatcttcttcacgaagtttcgctgcttcttctaacgtgtagcctactggaatataaccgtttaatggatcatgagcagatgtttgatctgtaactaagtctggtgtaatattgcgcttcactagttctggtaaaatttctgccgcatttcctaataaaccaatagaaatcggttctttcttctctttatactcgttcgcaaccgttaacgcttcttctaatgattctgtatacatatcacagtatctcttttcaatacgacgatcgatgctgcgcttatcaacatcaatagcaatgacaacaccgccgttcatcgttacagcaagaggttgtgcaccacccataccacctaaaccagcagtaagtgttaatgtaccttttaatgaaccatcgaaatgttgacgagctgcttcaccaaatgtttcatatgttccttgtagaatcccttgcgttccaatgtaaatccagctaccagctgtcatttgtccgtacatcataagaccttttttctctagttctcggaagtgatcccagtttgcccatttcggtactaagtttgagttcgctaacagaacgcgaggtgcatctgcatgtgatttaaaaatggcaactggttttcctgattgaacaagtaacgtttcatcgctttctaacgtttttaatgaatctacaatcgcctgataactttcccagttacgagctgcacggccaattccgccatatacaactaattcttctggtttttcagcaacttcaggatctaaattgttcattaacatacgaagtgcagcttcttgcacccaccctttcgtttgtaactctgtacctcttggcgcgcgaattgtttgttgtactttttccatttcaatctctcccttttctcattttatagtgctgcgtttacatctaatctttcttttatcgaataattcgtttttaaccaatgcgcaatattttcaatatctgttgagaatatacggtcatttttaatagatggcacctgctgacgaccttgatggtagaagctcttcgtcactgtactcatgttttcaattccgcgatattctgctgcttgcatcgcacaaatcatctcaatagaaagaacacgtcttgcattttgaataatctgatgtgcatggcgtgaagcaattgttcccatacttacatgatcttcttggttagcagaagacggaattgaatctacactcgccggatgtgccaacgttttattttcagaaactagtgacgctgcagcatattgcataatcattgcaccagactgaagtcctggttctggacttaaaaatggtggtaaatcatttaattgcggattcactaaacgctcaatacggcgctccgaaatatttgcaagttctgccattcctacttttaagaagtccatcgcaaacgcaatcggttgaccatggaaattcccgcccgaaattactttttccccaccatcaaagataagcggattatctgttgctgcattcatttcaatttctaatttttctttcacataatttaaaacttgccaagaagcaccgtgtacttgcgggatacagcgaagtgaataggcatcctgtacacgtagttctccttgttttgttgttaatttactatcatgaagaatgtcacgaattctgctcgctacttccacttgctctttataaccacgtgctttatgaacattttcatcaaatgcatcaataatgccttgtaacccttcaattgtcatcgaagcaattagttcagcttgatacgccgttgcttctgcttctatataagaaagaactccttgtgctgtcatcgcctgcgtaccattaattaacgcaagaccttcttttgcttcaagttcaattggctcaagcccttcttctgtaagagcaaccattgcatgaacgcgtttccccttatagaacacttcaccttcgcctaataatacgagcgcaagatgagataaaggtgctaaatcgccacttgcaccaagtgaaccttgttgcggaacgactggatgaattttacggtttacaaactcaagaagcatatttacaacaagcggcctaacaccagatactcctttaagcatcgtgttcgctcgtaaaattaacattccacgcgatacttcttccgggaatggatcaccaatcccacatgcatgtgactgaattaaattatgttgaagtgcctttacatcatctttttggataagcacatcactaaactttccaaatccagttgtaattccgtaaacgacttttccgtcctctacaattttctcaactacttcgcggcactccgctaccttttgcatactagttggacaagctgttacaccttctccttccagtaataacctcttcatttcttcaactgtcaatgtatgtcctgttaacgtaatcatcatttttcctccttaaaaaggcaaaaggggaccttatctttttaagacagacttctgtcctaaaaaagtaaggcccccttctaactaatagactatgggcaaatcatatgtgattaattcctaaaccaatcgcctcatgctcagatccttttacaggtgcaccaatcgttccatataatgcaacagcaacccattcgccttctttttttccgtcgtatggtgtaccgcgcacaatcgcaaaacgaagtcctactgtacgaagaacgtctgctaactgaatttgacctctcgtcactccgtacaaagcttccataattgcatgataaagtgcatgtgtttctctgtaaacgtctgtttcaataacttggttgcttttagccgctgtttccattgctgcgacaaccttttgcgaattcatcgaacccactttccccgtacaatacttccaaccttttggaatggataatacaggactttcattctcatccgcaagtgccaacagcatggccatacgaccaattcgatgtgttccttgaagaagcatgtgactctctcatttcttttgaattatttgaatattacttaatttaagaatatatgaaaacgtttaaatcgtcaatagtttaaaatcatattcaaacatttttttcatccccataattttgtgtacacaaatgatttacacaatttttccaagcatgctatagtctcactaacagatgcaaaggggcgaaatttcagtgacaaaacgaaaatatattcattttcgaattgaagagaaattacttaaaaggtttgaatcagcactccattacgaaggtttaaagaaaacagatgtattaacacatgcaatccaacaattttgcacaaaggtggaatgtgacaaaatgaatgatgtaaaacgtcagtataacgttagcaaccatttacaaacacgcatcgacacacatacacattacgaagaaaaacacgtagatttagataagatcgtcattgaacatttacaacttcaaggggaagaaaatatattagaggttgggtgcgctagtggaaaattcctttcccttttacaaacaaatggtcataaaggcccattaaccgggtttgatcaatccgaagctatgcttgctgaagctgctaaaacaaataacttaatagaatggaaacgaggggatgctagtaaacttcctttcgaaacaaattgttatgacctaataattgcaagacatatgttataccatgtgaaagatgttgaaaaaacgattcaaggattccataaagtaattcgtcctggcggaacacttttagctacaacaaattctagcgttacactacctcgtatagttgaaatgtgtaaccgtatgttagacgcatttgatttaccgaaaacaacatcatcagtcactccattttgtttagaaaacggtaaagagatattacaatctgtttttccaactgttgaagaaacagttattcataatgctctcgtttttcatcatgctactccgattgtaaactatatttctagcatgtttccgtcgctaaatatacctgataatacataccttcacgcggaaatgaaggtatggctaaaagaagaagtagaaaatgaattgtcacttcataacggtatatggcgtgacccaaaaacgttagccatttatcgatgtcaaaaagaaaaaagctagcatttgctagcttttacacgttttctcgtaaaagtttctccattactacattgcctttaccacaataaaaatctgtattatgttcgtctgccactccaaaataagaggcaattgctattccaaatggtacaaatgcatgcccttgtgctgtaatgatatttgagtgtttcacaacttcttcatacacgaaattttctactggaaaacaatcaaatttttgataatctatagtcgcagtataagcaatccctttaaataaccctgcttttgctagtgcatacggtccagcacaaattgccgccactaatttttcttgttcatgaaattgacgaatgattgaaaaaagaggttttgcatcttccaactgtccttcttctccacctggaataagtatcccctcatactcatctacacgtacttcacttacttctatatgcggctgcacttgcaatccagtttcacttataaccaattctttagttaagcccgctgtaatgatttcatatttatttttcagcaatgccgtcgctactgttatttcaaactctgcaaatgttgagtatacaaataaaagtatttttttcatagccctctctcctttaaccagtccataaaatatacctctaaatcgtccactgttaatctattcgtgtccacataagttacaggaaattttttataccagtctttttcagtttctactaatttaaattgctcctcaaacgtacttctgtttcttgttctatcattattttttctatcatatacattctttttcgtaacatctaagtaaaaaatcacatccgaacggcatgctcttaatttatataattcatctttcaattcagtttctatatcccactcttctcctataatcgttggataaaagagtgtaaagaactcaatgtcttctggtccgcgatcaaaaattacgactgaatctttcacattttgaaactcctttatttttgcttccataaacattttttgattcataataaaccctacttttgaattcatatctaaattcaatttttttcgcttctctacaattggatatggattttcatatataactcgaaaccctctcttttctaacctttttgctaatgttgtttttccgctagccatcggcccttgcagtgaaattacgtatgccacacctctcattcccttacactttagtacacctataatatacagaatcttgaaaactctcaacattatatatatcatcttgtttcttattcatatctaacttataatgaaaaatagagattatgacggacgcatcaataatgtaagcttggaaatccaagcttacattattttttgctttcccttttctaataaaaagagtatactagattagaacgtatgttcttagtaattacatacagtaaggagatagaacaatggtatacgacacaaaagcaatttcttggaatgaatctttaaaacaacttcaacgccgctatacaaacaaacaagttgaccgaaaagaatttgaggatattgaactgatggaattcttccgcgataacgactacatttctttacctacacatataagcggcctatcaaaaacacgttttacttcttactctattttcacaactgaagataaagatcgtaaagttggcacacttattattgagtatgttgaagacgataataataatttatgtgttgaacaactatacttcgtttaaactataacgcttggtcaaaatgaccaagcgttcttgctttctatgaatctcactgtatataatatgaataaaagaaaaccgctatcattaaggggggatatgcgtgctcgaaggatggttcagttggttcattgtattatggacggttattttattagggcttatgtctatcggtggatactttatgttcagaaaatttttaaaacgtttaccaaaagaagacggcatgtccattttggattgggaagaacactacataaataaaacgagacatttatgggatgatgaacaaaaacaattgttagaagagcttgtaagtcctgttccagaactatttcgtgatgttgcaaaatcaaagattgctggcaaaatcggggaacttgcattacaagaaaatgcctctcaaattacacaagacttgattattaagggatatatcattgccacaccaaagcgtgatcataaatttttaataaaaaaactacaagaaaaaaagattgattattctaactatcgatctttactcgcaaagtaacttcatattattttcgataaaaaagacagcgcctttgacgctgtctttttatttggtacatatacagtttttaagttagcttcatatctttttcattataaaaaccatcttctttttccatttccttctgtaatttcgtaaaggaacgatacattgcaattctccatgacacaatcatcgcaaacgcaagtaagaagaacatgccactaagttgtcctaaatcaagagattgacttaagtaggttttaaatacaatccgcactacaagtaatccaattaatatgaaaacaaaggcttttgaacgcttcaaataaatctcttgtcctctaatttcaaatttagatgttttaataagaaaaatagagaaaatcaaaccgacaccaattgcttctaacatttctgctggagttaatcgaaattcagggaaaacatacatcaatgcacccgtactcataaaaaatggtggaagtataatttttttcaatgttgcaggtttcttagctgcttttaaacgaataaacatcgcaccgacagccatacaaacagcaacgatacttgataaaagaactatgttcatattttctcatccttttttgtggctatatgcaaaatatactttcattatatgcttttccgttagtatttccaacattttcgcagaataatactaaaaaccagtaaaaccaccaaataaacttgagaaatatacgataattttcgtcatccagttaaagtataggaagacacccataacaatcataatatatcctccgactttcatgaaggccatactatttcttttaatccaagacattttcgtaataaagaatgacagtacgaaaaacgggattgcaaatccaagtatgtaagcaatcatatatatcattgctgattctggatttgttgctgctaatccaattacagacactagaattggtccggtacatggcgtccaccctgctgcaaaagctaatccgattagtactgatccaaaatagccacttggacgatttttaaatgtaaatttacggtcttgcattaaaaatttcggcttaaacaccccgacaataattaagccgaacacgatgataaatataccacctaactgtctgattaaatctttatagtcagtaaagattcctccaataaaacttgtaccaaatccaattgcaataaatataattgaaaatccaagtaagaaaaacgctgtatgtatcatacttcttttgcgaagcattgcattttcttctttcaattcagaaaccgacatacctgttatgtacgataaaaatgccggataaagcggtaagcaacatggggaaataaatgataagaacccggcgccaaacgctaaaaaaatactaatatcttgcatcattccactcctctccctaaatattgtaacaaaaacacataaaaatactatgaacaattcgtgaaatcacttttacaacgtggcaataagaaaaaccgcacttcctcacagtttctaataaaacgttttcatttccttctattatatagaaaaaacccaaatggattataaaactcctttaattgttattaccataacaaaggtaacatagtttctcaaataattagcacgttactagtacgtctatatacatattggtttaaaaaatattttttttcaaatgctatctctatacaatgcaaagtttattttataatacttctactattaaaaatttcaagattatgcataaatatcatacttttattattattctataaaatgtcatacttttctttcatttgaccctttatttctaattttgtatacttccctctagttatatattttcgatacggaacaacttcatatagatgggaggaatttttcatgcttcgttattctcttttagttttattaggagcgtgtagttatggaattttagctatttttgttaagcttgcatatgcagaaggattttcacttggagaggtaattggcagccaatatttgttcggttggattattttgcttgctattacacttctattttctagacatcgcgttcctttaaagcaagcattacttttattcgttgcaggaacatctgcaagttttaccggaattttttattatgcttcattaaaaactgtaccagcttctattgcaattattcttttattccaattcgtttgggtcggaattatcattgaagcagtcgcaacaaaaacattaccttcaagagaaaaagttatttctgttattttcttacttgtagggacatttttatcaagtggtttacttgaacaatcagtaggtgctttcgatacgactggggtcattttaggtttattatctgctgttacattcgcaacatacattttcgtaagcggaaaagttgctgttgaagtaccttcattaccgcgcggtgttctcttaatgactggtgctttaactttagtcatgattgtattcccaccaacatttatttttaatggtgccatttctcaaggtctttggaaatacggtttaggattaggaacatttagtatcgttattccatctattgcctttacaatcgggattccaaaaatcggttctggcttagcgactattcttggtgcagcggaactaccagttacaacaattatgtcagtattcgttttaaaagaggctgtactatcttcacaatggttcggtgtatcacttatattaattgggattgcaatcccgcaaattgcatacgcaatgcgtggacgttatcgtaaacatcatacgcataaaaaagtcgcagcataaagtgaaactttaattagttgaaccaatcgggcttttatgggataaacgagagaggattttcatttgagaatcctctcttttattgttgtatacttatgataaatattttgctgaagaaagaaggcatactacatggtatctatttcaaatcaactaaaagaaaaacttatttccatccgtcgacatttacatgagtatccagaactatcatatgaagagttcgaaacaacaaaagcaataaaaaattggttagaagaaaaaaacattactatcattgattccaatttagaaacaggaattatcgctgaagtgtctggtaataaaaacggaccaattgtagcagttcgtgctgatattgatgcccttcctattcaagaagaaacacatttgtcctatgcatctaaagtacgagggaaaatgcatgcttgtggacacgattttcatacagctgctattttaggtactgctttcttattaaaagaaagagaatcttccctaaatggaacggttcgcttcatattccaaccagctgaagaaagtagtaatggcgcttgcaaagttattgatgctggacatttacgtaatgtgcaagcgattttcggcatgcataataaacctgatttaccaataggtacaattggcattaaagatggtccactgatggccggagttgatcgatttgaaattgaaattcacggagttggtacacacgcggctgtaccagatgctggagtagatcctattgtcgcatcctctcaaattgtgatggcactgcaaacaattgtaagccgaaatataagttcatctcataatgcagttgttagtgttacaaatattcatgcaggaaatacgtggaacgtgattcctgaaaaagctacgttagaaggaacgattcgcacattccaagctgaaacacgtgaaaagattccagcactcatggagcgtattattaaaggtgtatctgatgcattaggtgtaaaaacgaaattccgtttttattcaggtcctcctgctgttcacaacgataaagctcttacagacttatctactcaagttgccacaaagatgaatcttaatatcatctcgcctagtccgtcaatggctggagaagatttctcattttaccaacaggaaataccaggttcattcgtctttatgggaacgagcggtacacatgaatggcatcatcctgcttttacaattaatgaagaggcactgcctataagtgcagaatactttgctttactagccgaaagagcacttaaacaattctcataaaaaaagccgttcaaagtgcatctcagcactgaagtgcaccccaattgttagacacagtctaacaattggaggtgcattttttatggctaaattttcttcaaaagaaaggatcaaactctccaataaagttagtttgtctagcatctaaaataaaaattgacgtttcacgttgtttgtttcgtttagttttcaaagttcaatatcgcgtttcagcgacttttataatttaacacttctcgttaaatctgtcaacagtttttttctttcgttgctgacgacgcttattaatttaccatattaatcatttaatagtcaacactttttaaaaaaatgccaaaataattttatcttggcatgatataaagcttaataatcactaatgctgccacacccggtaagcctaacaaactcgttattgctgctgtccccatgttaatcgggatatgaaaatcaaaatatgtccctacaacatttacgataaaaagcaatgctattcctaaagtaacatgaaaaatcaccttacctataaaacgtaatggcttagaggcaacaccaaaaacaagaaaaataaatactaaagtaagaatgccaacaataataattgtagaattcattttttcctccttatgaatgacctatacatctatttgtatgggacaagacaataaaaaagaacagttatcatatgcagcatctcttttatataaactaaataaaacgatacctcagcatttaacaaataaaataaaaaggcctgcttagaaagcagaaccttttaccattgttccatttttacaggacgacgctttgcttctttcaacaaaaagaaatatttcgcctctgctattttcaaagaacaaatgacatcttgagacggttctacactttgttcgaccattctcttctgacgtaaccactcattcttcactttttccaaaagtacaattaacttatcgtcatactctttacgcaatttaccctttttttgaaagaacattttcgtttctcctcttatacttctctgcgaccttctaacgctttggataatgtcacttcatctgcatattctaaatctccaccaactggcagaccatgtgcaatacgagttactttaatgcctgtaggttttaagaggcgggagatatacatcgctgtagcttccccttcaatattagggtttgttgctaatatcacttcttgtaccgtttcatcatgtagtcgctttaagagttgcgggatattaatgtcttccggtccaattccctccataggagaaatcgcaccacgtaacacatgatatacaccttgatactctttcattttttccatcgcgattacatctttcggttcttgtacgacacaaacaactgattgatctcgatgtgaatcattacaaatataacaaggatcacgatcagtaatatgtccgcatacagaacagtacgctaaatctcgcttcgcatttacaagtgctttcgcgaaacctaacacatcatcttctttcatatctaatacgaaaaatgccaatcgaaccgctgttttcggtccgatacctggcaacttcataaaactatcgattagttttgatattggttctggataatgcatgtatcaatatcctcctagaacattccacctggtaagtttaagccttttgtaaatttacccattgtagagtttgaaagctcatcagcctttttaagtgcatcatttgttgcagctaatactaagtcttgtagcatttcgatatcttctggatctacaacttcttctttaatcttcacttcaagaatttgcttgtgaccatttgcgataactgtaatcattccgccgccagctgtaccttcaactgttttttcaccaagctcttcttgtgctttcgccatgtccttttgcatcttttgcatttgtttcatcatgttattcatatttcccattccgccacgcatcataattaattcctcctaattattattactcttttatttcaatgagttcttgccctactaatttcactgcctcttctataagaggatcttcctttttctctgggctttcttcagactctccaccttcacgttgtaaaaagtcttcacggattttaccccattcactttttggaatggcaatcatatttaaccttttacttagcaattcaaataaagcttgttctactgtatccatagcttctcgattttcgctcgccatcttacagtgaatctcatattgaaatgctaaaacgtaagtgtcatctgaagctgccactggttcgctattttctagtaaaacagcaaacgctactttgttatatgatttgagtcttcctaacaactcaccccatacagcttttaattgttctaaatcttgacgcttcgcttgttttaatacttcatttacacgtccgacaggaatcttcatacttcctgttcttaccggctttggtgttgcacgtgtctctcttacttcctgttgtacaccagctggcacaccgttctttttaacttgctctaactctttctccagttgctgcatcctgttcataattgcttgcaaacgatctgtaccatttgcttgcatcataaactgttgacacaattgcaccataacaacttctaagaaaatacgcggatgatttgtccacttcatttcctgttgtcccttactaagggtatgaataatctcatagatcacttccggttgcatttcttcactcaacttacggaattgatcatctacaattactcgttccaacatatgttctagttgcggtgaagtttgatataaaagcatatcacgataatagtaaatgaaatcctccataaaacgaactggatccttccctttactcatcatttcatctatgatttgcaatgctcttgatacatcattttcacgtatgcattctactaaattgcctaagtattgctgagaaacagatcctgttacggccaatacatcttctgtcgtaacggtctcatcactataagatatagcctgatcaataagactaagtgcgtcacgcataccaccttcagcagcacgcgcaacaatttgtaatgcctcatcttccacttgcgtaccttcatttgtcacgaccgttgataatctctcaacaatatcattcactgatatttttcggaattcaaaacgctgacaacgtgaaataattgtaggcgggatcttatgaggttctgttgtcgccaaaataaagataacatgtcctggcggctcttctaaggtttttaaaagcgcattgaatgcacccatagaaagcatgtgaacttcatcaataatgtatactttatattctacagcacttggagcatattttactttatctctaatatctcgaatttcatctacaccgttatttgaagccgcatcaatttctaatacatctgaaatggatccttgtgtaattcctaaacaagaaggacattcattacaaggttcagctaccggagcatgttcacagttaattgcttttgcaaatacttttgcaattgtcgtttttcctgttcccctcgggccagaaaataaataagcatgtgaaactttctcttgaagaagggcattttgcaacgtttttgtcacgtgcttttgaccgactacatcttcgaacttttgcggtctccatgttcggtataacgcttggtatgacacgaaaatacggcctccctcaaaggttattatctcatttattataacccattctgtttatagattccaaaagttattttctatacaaaaaactcacctttgtattaaggtgagttttgtatacatatataactgccgtgcaccctccgtcgattacgtaccataagcgttactcaagcagttagctcggttcaggcactcctgcggcacacgagaagacccgcttattgctgcttccttccggacctgacaaggttcacggggtcccgttgcgcaggacccaaacgtcaacaccacttacttaaggcagaccttacagcaacataacctcgagaggggattcggcctcgctagagcggattgcgagtatagggcaccgctacctccccgcttagcacggcaaagttaaaaccaatattcggttgccttcattaaaggcattatcagtataacttgtttctttataaaatgcaaatacgttagttcccagtattcttctctaatttttttattgcttttctttttttacgaagctctctaaaaaagcttgttaacaacgtaccgcattcttcctctaatacaccagatactacttcacattgatgattgaagcgttcatccgttaaaagattcatcaatgtccctgcacatccgcccttcggatcacttgcaccatatacaactcgcttcactcgtgataaaacaattccacctgcacacattggacaaggttctaatgttacatacagtgttgcatcttctaaacgccatgtccctaattttttacacgcctcatctatcgctagcaactcagcatgagctattgatctctgctcagtttcccttaaattatgggcaacactaattacctcaccatctaacactataactgctccaattggtacttcctgtatttcctctgcctttttagcttcttctatcgctaattgcataaaataaatatcttgatcttgttccataacatagtcctttcattacaaataaagtacacttatttccatttactacacaggggataacttttacaaattcaatccaccctaaaagaaaaaagagaggggattacatatgaaaaataccgccttgctcattatcgatatgattaatgactttcaattttcccacggacccattctagctaaaaaatgtgaaattataacaaaccctattttacaattaaagaaaaaaatgaaatccttcggctgtcctataatttacgttaatgaccattatcaactgtggagatctgatatcgaccaacttattactcattgtacaaatgaatatagcgaaaacataatccataagattgctccaagttctgatgattacatttttattaaaccacattattccgctttttatgaaacacctttaaattcattactaggttatttaaaaatagaaaatctaatattaacaggggttgccggaaatatatgtatcctatttacagctaatgatgctcatatgagaaattatacattgtatgtaccagaggattgtatcgcctctaacaacgaccaagataatatacatgctttaaaaataatggaaactacattgaaagcaactataacatcatcaaccaaaataaaatttaattaatacatatatctattttctaactttttatatcaaattaacccgctcgcttccctcttgtgctacaataattctgttttgtgtttttagtagtcacggtaaatcactgattgaaaggaggaaacagcgtgaccggagtaccatttatcacggttgaaggaccaattggtgttggaaaaacttcacttgcgaaggaaatttcaactcacatgcaactccacttactaaaagagattgttgatgaaaatccctttttaggaaagttctatgaagacatcgacgaatggagttttcaaacagagatgttctttctttgtaatagatacaaacaattagaagacattaacataaagtatttgaatcaaaggaaaccagtagtagcggattaccatatctttaaaaatttaatttttgcatcccgcacattaaaagactcccaatatgacaaatacatgcaaatttatcgtatccttacacaagatatgcctgtgccaaatgtcattgtttatttaacagctagcctagaaacattgcaaaaacgaatcgccatgcgcggaagagaatttgaaaaaaacatggatccaaattacttactacagctcacaaaagattatgaaacagcaatggatgcttttaaaaaagatcatccggaaataccagtattgaaatttaatggagacgatatggattttgtaaaaaatcctgatgatttaaacgtcatcctatctgcccttcaaaatactctcttaaaggagtcgaaataataatgaatttaaggcaaaaatatgatatacccaatgacgcagtaatcactatcgccggaacggtaggtgtgggtaaatcaactatgacaactgcattagctaatgctttaggttatcgcacatcatttgaaaaagtagattccaatccatatttggacaagttctatgcggacttcactcgttggagcttccacctacaagtgtactttttagcagaacgatttaaggaacaaaaaagaatttttgaatatggtggcagttttgttcaagatcgttccatttacgaagacactggaattttcgcaaagatgcatcatgaaaaaggaacaatgacggaaactgattatgaaacatacaaaggtttatttgacgctatggtcatgactccttacttccgtcatccagacttattaatttacttagaaggttctttcgatgatattgtcgatcgtattcaagaacgcgggcgcccaatggaacagcaaacaccaattgagtactggaaagaaatgcatggacgttatgaaaactggattaacaactttaattcatgccctgtattacgcttaaatattaatgagtacgatattttaaaagatggtgattcaatcgaaccaatcattaaaaaaattggccattttttaaaacaaacacgtaaacttgtaaaataaaaaacccgtgcatatgcacgggttttcctattaaattacttcttctttgttggagcaataatttcactctcaggttttcctgcgttaatgcgctgacgaaccgtacttgtactaatatcgtatgcttcagcaatctctttaacagtcatttctttcccgttaattactgccgttaatactttacctgtacgttttggagccgccgctttctttacagctgcttttttaacttgttttggcgcctctactttactcgtagcttgttttacatcacaagtacaaccacaaagtttacggaatgtatcatcactaataatgcgtgatacgtttgcaccactgtttaaaattctattgttcttacagacaggacattgtacataatataaagtttttccatctaaaggaaacgtttgtataataagatccatgttgactcctttcatatctatgaagataatcatcggaatatgagtgtgtaataaggacaaaattaccttacaccatactttatgattggttttaaaataaaaactcgttacgtgttggtaacgagttctccaatctccacttatatgcgctgttgtcaattatatctggaggaggtagagggattcgaacccccgcgcgactctcgccgcctgtcggttttcaagaccgatcccttcagccagacttgggtatacctccatattgacatcaaatataatatcaaaagaaaaacagttagtcaaccctactaaaataaattatgaggaaaggaaaattttacttttcccttcctacattacagtactgacaacgctcataattaccaatcactcataccgatgaatgtttaaatttacttaataactgtttttcctcccatataagggcgaagaacttctggaattataattgtaccatcttcttgttggtagttctctaaaatagctgcaaccgtacgtccgatcgcaagaccagatccatttaatgtatgaacatgttctggttttccatttggctcacggcggaaacggatatttgcacgtctcgcttggaaagcttcaaaattactacaagaagaaatttcacgatatgtgccatagcttggaatccatacttcaatatcgtatttcttcgctgctgtaaatcctaaatcgcctgtgcacatgctcataacgcgatatggcaactctaataattgtaacacgcgttctgcatcatttgttaatttttctaattcttcataagaatcttctggttttacgaacttcacaagctctactttattgaactgatgctggcgaattaaaccacgtgtatcacgaccagctgaacctgcttcagaacggaagcaagagctaaatgcagcatatcttataggcaattgctctttatttaaaatctcatcacgatgcatattcgttacaggtacttcagctgttggaattaagaagtaatcttcactttcaatacggaatgcatcttcttcaaactttggaagttgtcctgttcccgtcatacttgcacggtttaccatatatggaggtaatacttcttcatatccatgctcatcagtatgaagatcaagcataaagctaattaaagcacgctctaatcttgcaccagcacctttgtaaaatacgaagcggcttcctgttactttcccagcgcgttcaaaatctaaaattcctaaatcagtagcaagatcccaatgtggttttggctcaaaagtaaattctttcacttctccccaagtacgtgctactacattatcatcctctgtttcaccaactggagcagattcatgagggatatttggaatagataacattaatctttctaagtcttcttcaactgtacgaagttcgttatcaagatcctttactttttctccaacctcacgcatttctaaaattagagcctctgcatctttcttttcgcgctttaatacagaaatttgttgagatacttcgttacgtttactttttaattcttctgtctgaacaagtagttctcttcttctcgtatcaagttcttcaaaacggccgaaatcagttaaatcttcgcctctatgctgtaatttcgcttttacttcttcaaagtttgtacgtaaaaatttaatatcaagcattatatactcctccttttattttataaaacacaaaaaactcccgtccctatataaagggacgggagttaacccgcgttgccaccctagttgaaagcattaccgctttcctctcaagtagaaataacggctcttcaccgggaatgcttactaatccaaaagatattccacattccattccaggatggattcacaaactgtttctatcgatttccaccaaccatcgactctctataagaaacgacatttgttactatttcctatcaacacgcttattttataaaattgttaccatcaatttactataatcttatacaagttgcaagttacttatacaacttttttcattttcgcttcttttaccatttcaacaaagtatgctgtcacacgatgatcatctgttaattccggatggaatgaagcagctaaaaactgatcttgtcttaccgctaccattcggtcaccatgcttagaaagcacttcaacattatcagctacttctacaacatacggcgcacggataaatacaccaatgaagtcttcacccacgccttcaattgaaagcgcagcttcaaaactatccttttggcgtccgaacgcattgcgctcaactgtaatatccatagcaccaatatgtgctttttcatagccaataagtgttttcgcaagaagaatcatccctgcacatgtaccaaacattggtttaccagactttgcaaatgtacgaagtggttccatgaaagcatacttatcaataagacggcgcattgttgtactttcaccgcctggtaaaataagaccatcaatctcttcaagttgctctatacgctttacaacaacagcttctgcaccacttgcttcaactgattttacatgctcacgaactgcaccttgaagacctagtacaccgattttcaccattttaaagttctcctttaattaccatccacgctcttgcatgcgttgttctggtaataacgttgaaatttcgacacccttcattgcattacctaatcctttagaaaggcttgcaattagttcgtaatcttcataatgagtcgttgcttcaacgattgcacgtgcaaatttctctgggttttctgatttgaagataccagatccaacaaataccccatcagcaccaagttgcatcattaatgctgcatctgctggtgttgctacaccacctgccgcaaagtttacaactggtaagcgaccaagacgtttaatttcaagtaatacttcgtaaggagcgccagtattttttgcatatgtcattaactcatcttcacgtagactcgcaacttgacggatttctgcattgacttggcgcatatgacgcactgcctctacaatgtttcctgttcctggttcaccttttgtacgaagcatagatgcaccttctgcaatacgacgtgcagcttctccgatatcacggcaaccacatacaaatggaactgtgtaatcacgtttatttaaatggtatacttcatcagcaggagttaatacttcactctcatcgatatagtctacccctaatgattctaatacacgtgcttctacaaggtgaccgatacggcattttgccataaccggaattgacaccgcacccataacttcttcaacaattgttgggtctgccatacgagaaacgccacctgctgcacgaatatctgctggtacacgctctaatgccataacggcaactgcgcctgcctcttctgcaatttttgcttgttcagcgttaactacgtccataataacgccgcctttttgcatttctgccattccacgttttacacgttctgtccctgttacatttgtcatgtacaaaaacccccctaggtgaattgctttcccccgttaaaggcgaaaattaagaatactcttacattctaccactaactatcagatgcttgtctactactttttcataaagtcggtatgaaaaataggaataaaaaaaagctcctatcatgaggagcttttaaaaccaaccttttactgtatcaacagcactattccacatgccactaaagaatgaaccaattccgcgcatagcacgagtaaaccagtttgcttcttctacttcagatgttgttacaagatccacttgcagtgacttaccagttaaaaatccagggtcgtttgtatcttttggcgtaattaccatttgaccaagcgcagctccctttttaataggtgcttcttgtcccttgcttgattcttttaattccgttttataaacatctttacttccttttggcactggaagtgaaatagcttgtttcgtttgaactgctacatctttatctttcgcattttctactcgtactgtttcttgtccttttactgaagaaccttttttatacatttgttttacttcaaagttagcaaatccataatcatatagcttctttgtttcatcaaaacgtgctgtatgagaacttgttttaataactacagaaataaaacgcattccgtttctttcaaccgtaccagtgaagcaatctcctgcctctggagttgagcctgtttttaggccgtctacgccatcatattctttaactaagccctttaacatccagttccagttcgacattgcaaacttctctttttctggacggaattcttttttagggatttttgctgtatctaacacttttggataatctttaattaaatgttgtgctaaagttgcaacatcctttgcagacattttattttcttcatccgctgttgttccttcaggatgcattccctttaaatctttattcgttaaacctgtagaattgacaaatttataatttttcaaccctagttctttcgatttatcattcatcatttttacgaagtctacttctttacctgcaattgcttctgctaatgcaattgttgcaccatttgcagaaaagattgccattgcctcgtataactcttttactgtataagagccaccattttctaatgcaacatttgataatgaagcatcttgtgaaaccttatatgcatattcagaaaccttaattttctggtcccacttaagttttcctttatccactgcttcgtgaactaaatattcactcatcatctttgtcatactagcaatggataataattcatctgcattcttttgatataaaattttcccagaattcgcttctactaaaattgccgcacctgcttcaatgtttaaagcggctcctgtttcagctgatgcattgctatatggcataaaaatgctacaagctagtgtaagcactgttaccaaagcaatgaatcttttgcaaaacatacctttcacttttgctacccccaatatctatgtactcacataaccgttattctaacataatcaaaaaaaaatagacagagatatcaaatctctgtctatttgtatataagacattataatgagtagtttggagcctcttttgtaatttgtacgtgatgaggatgactttcacgtaagccagcacctgacatacgaatgaattgtgcattttcgcgtaagaattctaaatcctgtgctccgcaatatcccatacctgcacgtaagccaccaactaattggtgaactgtatctgctaaaggtcctttatatggtactcgtccttcaataccttctgggacaagttttttattgccttcttggaagtaacgatctttacttcctttttccatcgcaccgacagaacccataccacgatacactttaaattgacgaccttggtaaatttcagtttctccagggctttctgcaacacctgcaaacatgctacctagcataacaacatgtgctcctgccgctaaagctttcaccatatcaccagagtacttaataccgccatcagcaataactggaatgccgtgtttacgagcttctgttgcacaatcataaaccgcagttaattgtggtacaccaacaccggctacaacgcgtgttgtacaaatagaacctggtccaataccaactttaactacgtttgcaccagcttcaattagtgctttcgttgcttcagcagtagcaacatttccagcgataatatttagtgatggatatttagcacgaacttcttttaccttatcaataacacctttagaatgcccatgtgctgtatcaagtacaattgcatctacactagcttttactaatgcatcgatgcgaagcatagcatccgctgttacaccaactgctgctccaactaataagcgtccttgcttatctttagcagagtttgggaattcaattactttttcaatatcttttattgtaataagcccttgtaatacaccgttattatcaacaagagggagtttttcaattttatacttttgtaggatcttttcagcttcttccagtgtagtaccaactggagctgtaattaattgttcttttgtcattacgtcagaaattttgattgagtagtcttggatgaagcgcatatcacggtttgtaataataccaactaattttcgctcatctaaattatttacaaccggtacacctgagatacgatattttcccataagatgttctgcatcatatacttgatgttctggagttaagaagaaaggatctgaaataacgccgctttcagagcgctttactttatcaacttgctctgcttgttgctcaatagacatattcttatgaataattcctaaaccaccctggcgagccattgcaatagccatgtcagcttctgttactgtatccattcctgcactaattaacgggatatttagctgtaagctttcagataaaactgttttaacacttacttctcttggtaatatatctgacctagctggtacaagtaatacatcatcaaaagtcaaaccttctttaacaaatttagattcccacataattgttccccctatgataccagaaattattattagtagcttatcaattggttaaaatactgtcaaggacgtatatatatgttagaatttttagacaataaaaggagcgtaatatatgcatcaaacatcttgtacttggcagcagttaagtttctttttttcatctcaaaacgtacaacgttatcttgcccgttgttacgaaaaatcctctattcaggatgccgaaaaaaaaagttttgaaaattgttatccctttatttattacttagaacacgggaaaaattattatgaattatataagacagctccattttccattcaaccaatgttgttattttatggaattagtcaactttttaaagcatgcctactaactattgaccctaactatcctgaatccactactgttttagctcatggcgttacaactcgcaaacgaaaaaaacaagggtatcaatttttagaagatgaggtgaaggtacaaaaaaacggattatttactcatgttgcagaacaactgtttcacatgaaacacttagaagcagaaaaatttaacatgttagaattaatgggaaatattccagaattacaaaatttatttcgttatagtcaaaaaggatcaactttatataaaatcgattcaacaattaaaaatgagctctccttttcagtcaacctactagatcgattacatatgactaaagagagattttctcgttacattgaaacatcttgtaagcatttatcaatacagcacgtacctgagaagactaatgaatcgaatttactttttacggcgcccgttcaatcatggaatcctatgtacagtactcctttatactatgaacatcttactaatacttattatttgccacttacgactgatcctagaaatcctaagccaatattacctgaactcctcattcattatttattgctctataatttaagcatgatttctaggtatgaaacagattggtggtatgacttacttggcagttatggttctgaagattatccatttatttatcaatttctaagtatttctgctcaaaaaatcccttactatatttcaaattttttattaatggaaccaaatctatttcatgggaaataaaaaaacacaagtcaaatgacttgtgtttttagttgcttggcgacgtcctactctcacagggacaaggtcccaactaccatcggcgctagagagcttaacttccgtgttcggtatgggaacgggtgtgacctctctgccatcatcaccaaactatgaaggcatattccttcaaaactagataacatttgctacatattatatggttaagtcctcgatctattagtattcgtcagctccacatgtcaccatgcttccacctcgaacctatagctttttagaaatatcaccatcaccttgcatagttaaaaaagtatctattgtatcctttgtaacataattagtgattttcgaaacataattagaaacaatatcagtatcaacagaatcataagttaaatcaggatttttcctcaaagcatcttctacaatataagtgttatcataaacttcactcacaccttcaacagtaagcttctttaataaagtatgaggtacataacgattactcaaaaagtgataatgaggttgtccactcttatgaaactctaaaactctaataaatttaaaatcaacaaattcattttctacaaaacgcttagaaatattattatataattcatctcttaaagactgatctttacacttacaatcataaatacaaagaaacctttcataaatcaaatcactatatatatccttaaacttagctttatcatcagaacttaaattcttataataaacttttttacgcttagcaacagaaataacagcatcataacgagaaattctaaacaattctacttcaacatcagaaagaattgttttttctttcttcttctcataccatttcaaagctttttcataactaaccttcttacgtttcatatatccttccaaagtaaaattaaaattcaactcatttctaattttactaaaaatcttatccaaatccttaataccatcagtcgaagtaagagtattaaagaaaaacaaacgttcacgttgagaataaaaacgaaccatcttttgtatatgtgcggcaattactggctgacatctaggacattctaatttattacaagtcaaagccttagcataatgcttaccagtttctttagacttcagatgtgctgtctttttgccacacttagaaacgtctaaagccataaacaaacacctttccaagtaaaataattaaacagacatatataatttgaattcattcaaaaattcattaggttctacataaaatttattataatgatctatacaagaaccagtaaaagttataactctatcaacttgatcaaaaggaatagatatcaatacagattcaagtgtaaaaataaataacatctgatcactatgaacacctaaatcatccaatgaaaatcccatgtcattgtcaactgtaaaaaaagaagttttcttagccaaatcataaggaactaggagacccagatggacagaagaatcagtacaacaaacaagaataaactggccaagactcgaggaaacaatgcgagataaatcagaagaaccgaccacaaaaccacctcctcaaaagtagaaataaaaaagtgagcgtttatcccctattaatattaacaagttaagagaaaaccaataaaataacgattttattaaatctttttatataaccaagctaaaaaatctaatgccatccaatataaaaatattaaaaacgaaatatacaaaccaaacgcactaacacctaaaacaatttccattaaatttctccttgctcttgatacttacgtttcttttcttcaatcattgcaagcacaaatgtagaacgattatattttttaaacggtaaattatgttctctagcaattgaatgtcttctatcattctctatatctacaatttcatctattatctgaatttcactttcagtaaatgtaaatgcccaagtttttttcttttctttaactgtcataaaaacaacctcctatcaattaactaaatttaatataacaaaaaccatatggtttgtaaataaaaacatatggtttttcaataaaaaaatattaaattttaattattgataggtttttttctgattaaatctatcaaatacactctaacagaataccaaattaatagtattaaaaatcctgtcgtgaaaataaacaaatcactatatatatcagatacatactttgttgtaacaacacagatcattgcaagcatacatatatcaaaaactacagttaaccaaaatttaaaattcaactttaaatcagcaaacatataactaacacccctacaatataaactaaaccaatacataaaccgattctatttgctattttttcattgtacttattacataaataaacatgtaaattatcacgatgtttagcaagaaatctataaaaatactttgttattaaaagtagaaaaaaataacataatccaatacaagtaacgaaagtaacaaataacgttaacatattcacactaggcgaaatacaaccaaatttaataagaaaactcataataccacccaaagctataaattgaagtggcgacataaattcatcatcttggctataatacttagcaaacatatatacacctcttaaactttactattctttaaacttaatctactcattattctaagagttaacataagaaaactaacattaacaataaaagcaaataataaagccattacacttaaaggcttaaaatatacggatattcctaaatacaaaataaacaataaaaaatttgtaaaaactgcatatccaatatcttcaccacttatagcatatttcctaaaaatcatctttttgtcttttaatttatctatattttcattaacaaatttcttatccatagatacatacttaacaaaaataaaaagggcaattccaattgctattagagttaataaattaaattcagcaccaactaaacaccaactaaaataaaaaaacatcgcaacaatattaaacaatacatggatatattcacgataaaactttttaaacatatatacaccccttaaaacgccttatttcgctttacaacctcttttttataaactacatagatattgctatctatataagttaaatcatcaaaaatccaacctctgtcctctaaatactctttatgtaccttaacttgattagattgatcacttctcaaatatttcaatgtcttagataaaacagttacctctttttcattacaaacaggcaaatccacaaatatcacccttcttttaaagtatctagcatgcctttaaacaagaaacaaatccctagagtaccaaacaacgtaacaataacattctccatcaaaacaaccctctatctgtatttgctaaaaggttaaacaagaaacaggtagtattttcttacgctctgcttcataaaatctccaccttttccgctacgctacattcttgcataacttttttaggctcgtttgtcttcatcgccaagtcgataaactcaaaagtgaatatatttaactatcaacttgcctatccattatacgagcctaaacgcttgtactaccgacctttatattttcttttattctatttacccattacgctatgcggggctagccccacaccccagccaatctccaacctcaaaagcgaaggaagacctttaaaacctaacccgtaaaccaatttagcaagaaaacaattacagcaatgaatgaaccataaaataatccgtctctcgccatagttttcaaccaatctacatgtatcaaatctcttcacctcatacttaatgttcgtattttcattaaaagcccctggaaaatatgcacggctgccgttacatttcacacctaaatcacgaacattattttgccatttgactaaacatcaaatctaaattatcaaaatgatgtttaattacttcacaattttttacttcttcttcatctaatccgtagcgatccatgagcaaatctagaaattctctcatttctccatgtgctttatttattcttttcacttcttctctaaattttttcttctttaaaattcccatctataacgtaccttccttatttaatttatataatcttatgaagtcctcccgcctgcaccgcgcatacagcttacgctgaatgcttgtactggcgtccgtactcttcggcggtcgacttcaacgcttctaaaaattccatgaagtcttgtcgtttatctggaacttgtactggagaaaccattgctgtcgtatcataaacttttgaaccaatagcaaaagctttcttcttttgaatacgcattgtttttaaatatcgtttagattgaacatcatacattttgtaataaaaatagtttttatcattcgataccctaacgagaacgtttgtaatacctcttatacgtgaatctaaatcatcaaatgatggtgaggtaataaacaacgtacaacgtagttttctaaggtaataagacaattgagaaaagaactttaccgagttacttgaaaaacttctagcatcaagatcaatatgcgcttcatcgagatttaagatactagatttctcttttgcaatatcatgaaacgtatctaaagttacaaatggtttagacccaattaaaccgtaattactgtacaatacacagccactcttttcttcatagtgttttgcaaacaaactcataccaaacgttttaccgctaccgagaaagccctcaaaaaccattatgttcatgctaactcattccctttaacaacttttgcgctatttgctgacaatgataatgaaggattcgcatttgctttcagtaaatgacttaatttagcattacctttaattcggtccgaaagcgttaatttctcaagtgtcttgtgatattcacttaatggcaatacttcttctttcattcccgcaatatataaggaaatatccgataatccattttcattaagcaataacatagccatttgttgtttctttgttaatggcacagcatgttttttcatgaattgaaacagttgaacagtctcaatcgtttcgtttgaaccttcttcttctaaaatatctttcgttaacatttcctgaacactcatttactccaccccattatttaaaaatagctagcaatacaataattacccaaggcataaaaccaataatgtcaaaaggtttcttccctgtatcaaaatcaaaaatcccctttaacgcactagaacgacgtaacattttcaaattttccgcttcaattcttgcgggcttttctaggttataaatgtgatacacataaccatgattatcatcaagtaatctcaattcattttcacgtggtaacatggctgtactcgtttctaaaatctccgaatcaaacgatatgacctgttcaactacacatgttccttcttccttaataatcaacgctctatgcccttcaaattgtggctgtacttttcgttttgttttagctaacatttataaaaacctccaaaacgttcgttttttcatttcaaaacctcttggatctagtcccgctgccatgacattttgaatccttttaacgaactatataaactaattaatatttaacattcgtttttatcactttgacattttatttttgaaaaacatatatggtaaaactataaaaagaaatatagataaacaaactgcacttgataactcaaacatcgcattaaaagcctgcattattttaactctccttttcccgatgttgcttcacaaatcaaaatcaaaatccaaataatgaatcccaaaattgcataaatcattcttctatccctctaaagaaattcaatgtatctattaccatccaagaaacaactgtcgtaaaaaatattaataaaattgcttgccctacaatattcaatatcattaccaccatttcactgtatctttaaatcgaataaacaaactactgtaagtcatgatgatgtaacaaacaaaatatacgaaaactaaagcgaataacgtcgttatgacggttgtccaaccgtataaataagcaaatactccaaggtaatcactaattcgcaaaggacggcttgccggtacgcttaaatcacttaaatactttgccatttgtgcaagccaaccaagaacaggattaaatattgtatcaattaacgcattcattaatgatgaccacctctgaatagatccatgagctttttaacaaacaagtaccaaataaaacatgtgaccacagccggaataactgtaagtaatccagtaggaagtaatatatcagtagccactttaaatcctttcattgatgcactaggaaacgatacattcccaccatcaaaattaggctgtacccatagaaataaagttttaaagaatcccgctattacagcacctaaaaactgaaacaaggcaacgaataattttataattgctactacaacttgaaacagcttttctatgaaataaaagattccttttaaaaaatccagtagatattgaaatggtgtagctaaaaaatcaataaacgtttttaacgactttataaccgcttcaaatccaccttttaagaacttaacaaacttctccatcatgattgcttataacccaccataatccttctaatgcttatagcaacagagaatgtaatcattaatacaaacgctagaaataatacgtcttccccagcatggaacgcatactgtagaaattgtattaaatccttagttgtaactggttgtatcaaactaagcaccgttgccaaaaccttataaaactttataaagtctgtttacttccctactctacgtgtccgattttgccgaagctactttcgtttgacataacactccaagggcgtaaattcggatacaacgaatcctacatattagcaataacgttttagtgttaatttactaattgatagcgtgacaaattaatagatgcatttaaatccctgtctatatgatgcccacatttacaatgatacgtcctatcggatagcgttaaatgtttattaacttcaccacaatttgaacactgtttagacgaagggaaccacttatcagcttctacaaattcaattccgtatttctcacatttatacttcattttcattttaaaatcatataatttttgttgtgcgatcgcttttgataagtgtttatttttcatcatacccttgatattcaacgtttccataacaactctgcaaggcttggttttcacgattgcacaagtcacttgatgaatatgattatctcggatatttgtcaaacgtctatgtaaatgttgtatcttcttttcaagttttataatattgcttgttttgacgaaacagcttccctccttatttatttcatatttacgagaaacttgacgttgcaatctacgaaggcgtttctctacctgttttactacctttgttttattgatatttttgaatttcattccattagaacaaaaagcaagttctttaataccgacatctatccctatacttgcatttgttaactcttgatgaataatctcttgttcaattccaacagctaagtaccaatactttccgtcgaaactaatacgaggatttgaatatttattaacaactggtatacattcagatgttttcacccaacctacttttccaataagaaccatatttttcataacttttaatttcacgttatcattataaaaagatggtttagaatgtctacgactcttaaatctcggtttatctacaacccctttaaaaaaacgtttatacgcttcacataaatctttcacagcttgttttgtaacattattagatacatcatacaaccaagcatattcttcagtttgttttaattgtgtcaactctttacgaagagtaccatcagatataaattttccaccttgtttataattttcttcttgtctggataatgcccaattataagcccatctggctattccagtagatttccataattgcatttcttgttctctatttggtttaagacgaacttttttcactagtatcattatttatcacctcctaaattcattgtacattcaactacattcaattgcaagtcgattggatgtattctataatttgtttagaggtgatgaatatgagcgaaaatcgtggattaaaaacaagaaaagcattatcaaatgccgtccgcattgaattgtacaaacaactaaaagaactatcagataaaacaaaaattccaatgagtaaattattagatgaagcaattgaagatttaattatcaaacgaaagtctactaacaattagtagacttttataatctttttaacagttaattcccctacctcataaacaactttttcgtattaaacgcaacaataaatgctaacggaatagcaatactaaatgccacaatcggccatatccccaggaaccaatttgttatcccatcaactaaagcacctaaaccaaaactaaaagtaacctcaggaataactggtactttaggaattccattaacaacattgcttaaatcactttcaatattccacttagaaaccgccttaatctgtacaccataagtttgaccattctgtaaacctttcacagcataagaacgacttgtaacaagtgaatcattaacttttacaccatcaataaaaatgtgataacccttaattggaacgcctaaattttgacttaatagatttacaactaacgagccatcttttggcgtaacatcaaaattagaaggtttaaaaggcttattaagattaggttcttcatcagtctttactttcttcacaattccatttgattcaagaccagtagaagaaacagaaacaaatttataagtatattccatacttccttttaaacctttatcaataaattcctcaacattcacattatccgcaatcactttatcatcacgataaattttcacatgatcaaaattatttttaggaaacttataactaaatttcacataagtatgagttatttcatcttcctgtaagtcttttatttcatctggcaaaggctctttcactgtctttatctttttctctataccttttgattcaagaccatcaggagaaaccgaaacaaatttataagtatgctccgtttcaggagttaaacctttatcagtgaatttttcttctttcacatcactagcaagcacttgtccatcacgataaattcttaaatgactaaaattcgacttcggatttttataagtaaattcaactgaatcatgtttaatattttcttttaaatccgtaatatcagatggaggaacagattcatactcatataaattaacttcagcaagtgtaaaataatctccattgctcatatttttcaatccaatttttttaacacctttaatatcaacagcttgtagataaccactatcagtatttctatattcccgctttaaagtagcaccctctgtataaaaataaacatccattctattactagagccaccaactttagtaaacctaaaccctgaaactctaacaggagaagctaaatcaattatgacctcaccattagaaagagtatcactagtttgtaaatttccatcagttaatgaagttatatatgaactaccatattgagctttacctactcttccacttaatacatctttaccttgagcaaatgcacttgtatcacctacaaacaaaatcccaagtaatacaggtactactataaaaaatttctttatccgcattttccattcactacatgccaacaaagttcactcccctcgtcacttggtttcatttcttcccaaggagtcattggcttatcttgtttcatatcattatcttttttcatttctccctcccgatccataggcttatcaggagtcattggtttatcaggtttcatgtcttccttttccattggtttatcaggagtcattggtttatcaggcttcatgtcttccttttccattggcttatcaggagtcattggcttatcaggcttcatgtcttccttttccattggcttatcaggagtcattggcttatctggtttcatgtcttccttttccattggtttatcaggcttcattggttcttctttatccatatctttttctttcttcatatcttcttctttctgattatctttatctttacaaacatccccccaacattcagcgggctcaggagcaacaggaagtttgtcaggtggtttctcttgttcaccctctttaaagtgctcttgtttgtcttcaaaaggcttatcaggttgtttaggtttatcaggcttaatgtcctcaggtagaacaggtttaatcgacaaatccatatcgtcaggaatcttcaaattatccctaatatccttaacagcatccgcaatttcttttgtgttctttgctatttcatcggtgttctttttaatctcacctgtattctttgctgtctcacctgtatttttagccgtttcacctgtattctttgaaatttcatttactgcactaacaatcttttctaaaacttctttaacagctttatcagaaccaccgccaccatctacaggtggtttattatcttcttttgattcatctatatcaccgctgccttgtggtttatcatctggaattttttcatttgtacaaactccgtcattcttattatcataatccgcatagtcctcaggattaggcttttcaatttcaggtaaatcgtagtatttagcacctttgccccaatatacagtttctcctccaccgccaccgttttctttaaatcctttaagcttaaaacgtgcatagcctaaaactttaccattatgaaaaatgtaaaatgcgtatgtaccattctgattccagttaatagggaactcgtttttttcttgttctggacgagtccactttgatttaccaacatggaacgagcaatcattaacaagcatcaattccgataactgaaaactatatacatctttcatattgttaactttaataattaaattgtatttaccattaactatcccattattttcgattgttacatttttactacctaccaattgaaaactaggtgaatcagcaaacacagggatcgtatggctaacaatacaaaatgcacataaaaaaattatggctagctttttcatatcaatccttcctaacaaaaatagctaggttattagcccagctatttaattgttttattaaatttatagttaacttcttgctatttaaggagtgattatttgatgattaacgagtaaataggtctttagtgttaaacgccactaagaacgttaatggaatcgctacagagaatgcgataattggccaatatgctcctaaccagttagtcaaaccgttagcaacgtctgcaagattataagtcaatgtaatttttggcatttccaaaataaattcctcctaattaatcaatcatcaaatttgtcttttactaaatgcgctacgaaaaatccaaacagtatcccaaacaaaacaactaacaatggcgtcattgtattccagttcatattgaaattaccgaataattgagacatcgatggtctgaaaccaaattcaggcattgttatcaactcctaagttctaaacgtgttatacactttaccgatacagtagatagcaaacgccccaccaatgaataaataaatcactggtaacactgaactaaacatgttgaaggcatactgcaagattcttcccacgtccatgctaaaactaatagccatcaccccaagctttgacggtggtgaacatcattattacgaatactagaaaggttataaaacctaacgagtataatacaactgaattgttcataaaaaaccaatacatcatatctaaaaaggctaaatcattcatttatcaaaccgccaatctttaagcaatgtgaaaacaatgattaacaaaaatgggagtccaaatagagaatattggtttaataaattttctaaattaaattcaatcatcgcaaagcactccaaatccagttgaatgttaacaccaacaagattagtaatagcaagaaactaattaacatatcaccataggtaagtgtctggaaaactgcaaaactaccgttcttagtctgtactaagtagtttggcatgatttccgaaatagttttgtacaagtcgtttaaatcgattttatctaacataaaatcacacaatcacttcagtcttataagtcctcgtactacttaacaatctgttgcaaattgtaatatgcattattcttatatgcacttacagatgctagacacttaaactcatcacctaatttgtagccaccagaaatcgttgggaacaacgttacttctttactagaaaccctaaccgtctcattccctttttcacctttttggtacaaatcaacaactacagttgtttttttattcccttcaaactctttttcaaccatacttgcgcccataaatacgccttcaattttaactattggcattataatacctccatattctaattttgcgaacataaaaacgaacaaattttcgagtccagattttacgttctgattatagcaaaaaaagggacagaatacaagaagaaattttaaaaaaaattttttaaatctttttgtgcttttttaaatgttctacaatagcattttctacaaattcagattgattttcttgttgctttactaaatcaacatatttcttctttatagaaacatttaatttcacctttttttcgtctggatcaatacgatgtctgcccacttttttcttactccttttctaaaaaaaccatcatgtctactataaacaaaaatggactcataaaaaaccgaacataaaaaaagttgagagtctaaactctcaactatacttcttcataaattcatacaaagctaattcaattaatgaaaactttgaaatccttttacctgcaaactgttttgagaactcttcaaattgttcatgtatttctttactaataacaatactactctttttactttcctttgattcaggaagtgaagccaactctaaaaacaatttagcctcatcactttttactatatgtaataaatctttcaaagctaaaatttcagattcagtaaagtcattctgatttttttctgatttttttctaactttatttaaaacttctttttctttactctgatttttttctgactcatttctgaattcatttacaacatgtttttcttcattctgtatttctgctgatttttttctgataactttcaattcatttctgttatctttcttatttaaatcagaaaacaatctgttgtctatctgatttttttctgactcttccccaacatataaagtttttttcttagaattatcatactcatacccaactgaatttaatcgcctacgcaaagtatccttacttacacctaattttttagccatatctggcatagtcatagaactattaatcaagtcaataatttcaacaatcttcacaatcaatcattctccttttttagtctatatctgaattatatcatattttattcatatacatttctgattttattctgatttttttcatatacaacaaacaaaaaagtcagatataaatctgactttaattctagacgtttctttataaagtttgtataatacaagtacaatcaatcaatttagtcttatgagtcttcgtctctagtcaattcgaaaactcacacgaatcttcttgttttctaatgagaagattctttttttattttctcatccattttaataactccatgaactacgtcaaacacattatttagtgtcacattagatacaggctcaggaactgtattaatcatattagttaaaaccatttcattaggaacataaacctttatacttttcttcgctcttgtaatccctgtgtacaataaattatttgtattcaatttcggctgactatctacaaatactgcaacattctcatactcgctaccttgagatttatgaactgtaaatgcataagccggtacaatttcttcagtatcttcatatttgtaaaatacatctctatcttctagatccaaccgaacacaaacaccttgatcatcataatttacaattcttccagtatcaccattactaacatttcttgctgaactattagcaataatcatgacacgatcattcaaatcatacttaaaatcattaaaacaaagtgtaatatctttctttttagcttgaacaatcaaatttatatctttagctaatttccttgtattagttaaaatttgatagccttcaaaaacaagtctctgcaccaactcttccatattttcatcatacaagtcataattaatcaatttatgatctaatacattataagcctgtttaaggacagcatcaccacttctaaatacttgtgttaaacgaatagtattaacaaactctaacgcctctaattcaggaataatacttgtatcattcacaggaggtaattgtgcatcatcacccgcaaaaataatcttcacatgactcggaacagcctgtaacaacttcgctaaaatttcacgtggaatcatagaaacttcatcaataatcaaataagcgcaatcaattacgttatgttcatttctaaaaaaattagaactaaaattcgaagcgcaagctttatgtatagtcattggtttataaccttctaaatcttgctctcttaataactctctaatcctactagaagcctttccagtataagtacaaataatagttttagttggattaggattcaaacgcttcaataaattaacaagagtatatgtcttacccgttccagctcgtcctaaaagcaaggtaatacgattatcaataaatgatttaagtaaccttacttgatcaaaagttaaaccttcagtacgataattaccaagtctctctatcataaaatcaactgaagatatagctaataatctttcgtgaatcatatagctatacttaatttcatcagacaaatctaattccttaacaagctgacttaacctaactgcatgtggatcagcattcatataagaattgacccttataaaatcttcagcactattctcaaaacctaaaggaatctcataactactagaatttaattgataatcaaaaacacccaatttaatatattttaaatccttttcatctttctctttaaaaatcttaatagaattactagaactaataagctttttagaaatatcaccatcaccttgcatagttaaaaaagtatctattgtatcctttgtaacataattagtgatacacgagaagactccttggaagaataaagtattgttgtccttattcccccttttcggggggatgggcaaaaacacccatttaggatgtttttgaatatgggaacaaaacaaaaagacatgatgaaatttcatgtctttataaattctctatttctaaatctacttctaattctaaagcttcgttgcatgctttaaataacatttcaaacatgtccttaccgccacttgtgtaaaaatagttagataagtctgtaatatctgttgaaatattatctccccatggtggttgcttggataagtcttcgatatcccatactacctctgatggtgaaaataatttcaatctttcacgagcttcctttgcttcctcgattgcctttgggatattttgaagtgttaaccttccgttatatagctctttcatcaagtgtgggtattttgttccccaaccctctttttctaaatgaaaactaatggttgagaaaaatgagtgtacaaaatcagatgtacctaatctataccatagaaagtctgctttaaatcctgttgccataaatacatctcccttctatctaatctctttcgatagttaccttcaatttaccaaatgttctttgtgatagttcctctttaatttcctttaaagtttgaagtgatacattttgacctcttgcatcaataaaagctatctgctctgcaccttctggtaaattttttaatctatattcaaattgttttagtaaaacattaattaacgaacgtttccctctttcggtagtaaggttataatttttaacctccaaactactatttaggtcatggtcaaaaccgtctggtctagtactgcctttacttgcatacggtacttcttctctatctttaaatgatacttggtctttgtaattaggatatttctcatatgcatgtttttcggattctcgccaatgtggcctagcaaacatgagatagctactcaaataattcccccagtgtcccgatggcggtaacgcactgagcatagcttcaccagttaaaccgacacctgcaaaggcaggttgtaaacgtggtggggtaatctgggttattttagagaacctagcccctctagcaagtgttgaagctttatccagtcccttgcctccaagaagtcctaaaccaaccgatgttacaagataagaaccccaatgaaaaccgctttcaacatctccgtaccaaacatcattcataaaagaatcagagaaagcattccacatagcaggtagcgtttcatcataattaacaactgcatcccacatatttgaccatgtttcaccgtctcccaatgccttaaagccttcccatgcatcaccgacaccttttcctgccccatcataaagaccatcccaagccttctctaaatcagattttggttttccacacattgcaccttcttcaatatctccactaaccaaattctctccatataatgtatcagcttcacgaaacttttcggcagaatgatataactcttttgcaattttgtctagctcttgaaggatattgaacatcaatggctttgcatcgttaaacattgcatagaatctattactagttgctccgctccattgtgaagctatgtattctgtttgctgatacaggtctttatgtatctgttctagtaaagtcctagaatcaatgaccatctttgctgattgctctagacgttctggtgtaacttttatttgaaccaaattcatcccttcttttcatagtttgctaatctatgaaaattataccatataaaaaagatagaagaatatggatgttataacccttgaggatgggctataaacaacttttcattcccattcgttcttatttcttcttagacgacaccatacatgcccatcaaatatatgaaactacctaatccccaacaattcacattctcttagatctaaagtaacaaccgtgattaaaatagctaacacaatccacgaaaaagaaacacataataaagactcctaaataaagagtactctcaacaaaatttcacataccgtatgcaaatattaaaacaagaaccataaatagaactccataatctccactaacaggaaactctaaaccaaacttataccgataggtatatatgtacgggttcggccatttatttttttgaattatccccctggcccagagcgtttatttctactatttttatttgcttcaggttcgcttgtttggcctcgaaattgtacttcaagtgtagtgctctcgatctcttcattgaatgctaatttccctaataaaaaggctttaaagttatgtttattggatttcagtaatacacttcttgttgtaatatatgtacgagcatttctgcccttttttccattagtctttacaattaattttttagaaacctttaatacatcggataagctagatttattcattgctttacctactggtgactcttcaccaattttttgcgctaaagcacgtagagagccgcataaataaggtgcatcagacgtgcattgctgctctaccatctctataatatcttgctcccattctgaataatggctttgctgacggtctaagcgttcctttgctggtgtacggatatcaaagacaaattccattctcatttcagccagttcttctacataatcctttttaggcgcattatatttatcattcatggcacttctaacagtacgtaaaatctcagtatgctttaatggtgattttatttgagaattccattcatctattttgtcaatgatttcactttctgttttaccttcatatttcatagctaaagataaaataaatacagcattattacggcctagcttgcctttacagccacgtaaaaatacgttattgataatactttgaattgctggatcttccatgatgccaacctttttatacattctacttgaagaagtattagcaaccgctggtcttttatgcttcctagattgttctttagcccatgctaaagcccattctgagttcaatgcttgtccattaaagtaaaggacattatcttctcgtggaattctaaaataccctagcgaataagccccaagatccgcttctaattcaaatataggctttgtagttccttcttctacttcactagcatccatgacatttacaaaggctcttttaatttcttcagaaacaaaacgacctgccttacggcctttttctgtcaaaaatggtgtagagaatacataaaaccattgcaatcctcgtggtgttgaaagaataacacttggggatggcaagttatttactgctgctgcataatgaatttcttcaagactaatttttttatctatttctactccaacacatgtaatgaaacgaatgttttcaaaattacgcccttcattattagcctttccccacatatagacttgtggtgtccagtgtgtcaaatgattgtttaagcgttctaatgtctcaaagctacttaccacaatactttgtcccgtagaaagttgctcttttccagtagttacatgaacaactccaacctctcttaatctttcacgttgcatttctctctttctatcatccattgtccaatttttaggtgatttttcatataatgcaccatgaaccataaaacgcattacatcaagcgatgtgtactctgttataggctctaaaatatgtttaacttgttccattaaatttctactccttttggaacaacaaaaaagtgttgttctctgctttttttacagcagtaaacaacactcgatagccttcgaatatctaatatttagaatacactttattcgcaaaaaattatagaatcatattttaaatatactttacacacaaaataaaacatgatattatgatgatgtaaatatgcgaattgtagtgctcgacttttagcggggttgctcactactatgatggatgatgcgggaaacatcatccttttttatttgtctttttttatatttttttatttatatatgtatttattatctttattttaaatataaacaaccaattcgggaaataaattggtagaatatttatcttcgatactaataatactaaaatatcatctaaattacaatacgtatacttcaccattatacctaaaatagaactttttaactaccataacatctttttatatagttatttttacctattaaataaatcgactatccctccaaatttagttgtttttcatcaaaatacccccatatacctacttatatcctttcaaaactctttattcttgcattttccacaaaatctcagtattttttatcttattactattataggattatagttgtacgaatagaatatagtactaattcagttttattctttttcaatattcaaaaaattaaattccactcaaaacgtgttaatatttatatgggtctaataacttttctattgttatttaaaagcataaaaggagggatataaggatatggaacctacaaacattccttataacagtaatattatcatttggagtgatcaaccaatatacagggctgggctaaaacaaatattagaagccaagttagatcgaaaaatccaggatgtatctacttataatgaattagaatctactttactagaaaaaggactagataatgtatcacatatattacttatagactacgaaacgattgaaggaagaaactttttactatctagtttaaaggataattactcattaaaaataattgcattatcaaacaaaagcctacaagaagatgtatttagtgcaatggatgaatatgatatagacgtttatttgcttaaaaatattgagattaataaattaatgtgtgtactagaaactattgaagatccaggagttgccttcttccacactgattttacttcttcgaagttagataatacaaaagataatttagatcgcttaaaaatttacgagcataacactggaagacctgatggtttactaactaataaagagtgggacattttagaaggactaggtaaagggtattctaatcaacaattaacggaaacatttgaactaagtgataaaacaataaaaaatcatgtttcaagtatactaaaaaaattagaagtaaaagatagacttaatgccgttttaaaagcattaaaaaaaggttggattaaaatagattaagtggattaggggaattaatcccccccctctaaaatttttaattggttatcgcttattcagatgtaataaacctggatattattttatatagaacatttatttgacctacacttacatatttagagatgcattaaatccttgtgataattggtttattgcatctcttaaaatgtgtgcacgtttaacattttccccaaattcctctgcaatttcatccaagattaaaaaggttgttgcatccaaggtaataggaattaattctgattcagtacgtaatcgtttctttaattctttagctgttatatgtgggccactgtattcctgtacaataaactcttctatagttttatttctttcataactatctatatatttagctaaattatttattgtgccagcttcaacgtgcagcaacgtcctttttcgttctggctttggaaattttatatgtctatatttattgatgaattgttcaaacacatctctcataatagctgatcgattcacgtcttttttagcgtttaatccgctttcatttgctattttgaccatttcatctaatttattaatactgcgtttatccattcttatttgataagcttcaccttcaccttcaaatgcgttaactattttagaaggaatatactccttttttaaaaacttacagattgtatgtgcccgtaaagtctcaggaacaatttccgtaaaatcatttatttgatcaatataaatattaaatgacatttgtgttttcatttgataccacctctttttgccaaatctatccagttaaatgttaaaaaaaattcctggatgttttaatccaggataaaataacaaactataagaaaaaaagcttaaaccatcaatcatagtagcataataacaaactgaagacaatactatatcaacttaacctcaatagtatcattactttctctttctttttcaaattcatcagaagctttattccatgcttctttaatatctttggcgaaaaatgtaattgaacgaacctctcgacctgctttgtttgtttcaggattatatttctttaaaattgctttatatgttaatttattcattatattcaccttctataattactgaaactacaaggatacacatctagacaacaattccctacttcttttctgacttgacttaaaacattggctatatagttcatttaaatatttatcagtaattctttcaggaaaatagccttgtatttctataagtaaattttcaattatccaagttctctttttccaaaatctatataattcctttttttctttaattacatgttttgtactatccgtatcatgattagcttgaactaacgatgaatatgaatctgatttcttttttcgcataatttttaaacatactattagatcgtatgtatgatactttcttaatacctctataggctgtacagcatcattttcatctacatatctttttatttttttaggacctattgtacattctataaaattgtgcttacaaaaagaacatgtaccacataaattaatatctatatatgtattgcaatatctacaattcattttcccccatgctcctttttttcacataaagttcgaactatattttgtgcagttacattagtaacaaaatagtaaacttccagtccttttctatcagatcctaacacctttcccctcatttttgatagatgttgtgataccgttgattgcgggatatgtaataactccactaattgtgttacattacattttttatgtcgcattaaaacatcgactatttgtagtcttaccggatgcgctaaaatttttagcatatctatattttcctcagttattaatttttgtttcatttgattttgaagcactgtcattagaatttctcctttattatttatttatcgttttaacattttttgattcttatatattaaaataatgttttttatttatttctaaacacaatcagtatttatatgattaggttcattacaattatttttatgtacaatcatcttattttgtttagaatgtttcatttgatcccacatgtattgaaggactttatcagttatattagaaggaaaataaccttgtctttctattaaaatattttcaattacatacattcgcctagtccagtcattaaaaacaagtaactctttttcagcatttttttcaaattcaatgtcctgctttgctgcttttaaaaatatctcataccccatatataaaagttctcttttttctcttatctcttttaataaaatgtataaatcaaaactatgatatgtttttaatatttctactgattgcatcgcatgctcttcgaaaatattagttttcattttttgaaagttaaacctttctcccttatcacttactaggcgaagacaacctgtatttttatctctaagatccgcaccacaaaaatcacattttggtagtagaactccatttcttattttttgttcacttgcacaatacggacatattggatacttcacttaaattcaccatcccattataatgatatactgatttttatatttcaattgactttagaacctttaaattctcttccttacacatataattatatcacattggtatatgttattcaataaaatatatgtattatttatcgtttttatgaataaacaataaataatacaaaagcatataactattttcaagttaaaagaaaccactagcatttgagtagcgaacaacttacgttcttctaaagaacagctattaaaaatggtagaacacgttctcgaacatattccaccatttcaaaacaaactagcttataaactagttgacttgatatatcttatttgaaaattctttaaggatatgtttaataaacatggtgacaagctatacaaagataagacatgtacactagagcattgtcaacggtaccggactgaccatagcaaagcgacgggagggaggataaggagttgacaatttcactacaccaataccctcttggcattgccaaaacctttcgttttggcctgcctaccggcgagggtagctcccccgatgtaacgggggctggggggataataaacagctatccaacgggctaccgttggctgggtttgggcgagtagcccattaatttttgttccactctaacaattagtttaaaaacgcaatttaaggctcctatctctccctttatcacatttcggaatccatttaaataaaaagtacagaaaagatataattaatctctaaacccatgtttgggcccttattttcaatccacttagttactcaacaaatttcctttgactatctgctttatttagcaagctttagcttgctactttgataaaaacacggtgcatccgtgtttttcatttttaaattggctcgatgccaacctttcaaataaaaagaagcggctcctattgagccgcttctttcctggcgtataaattattatttataataaagttttacttgatttaatatcgtccctttttttatcaagttgatgaattattgtaagaagtataagaaagttacaaacactaatcattcctaaccccaaaaatataatttgtaaaaggaattttaaaaaaacttctattcccataagcccaaataaatcagcaaaaaaagaaaaatattctataactattcccaatataagtactaatgctatagtaaggatcgtttgtctaaggcttgatttcctcttcttttccaacatttctacttcatgtatcttatccatcaaaacacacccttttttatatttatataacccttaatccatataaataaatttataatcaaaattcttctttacgtatttgtttttcattagcattaactatcaatccaactatgcctagtataaaacaaaaaccaaagactcctattataattcctttaacacctgcattattatatatttcattaacaagctgacctgtagtttctaaaaatttatataataaaaataagaaaaacaatgtaagtggaaaagctccaaatacaattcccactatctttgtgtaacgtattcctatgtaaaataagagtaataagattaatataactataagactaaacaaaccaattaaaaaatcccccatattcattacacctttcatagtatttagtatttttatttcctgttgcaaccaactggatctcaaagatataatttgttctccagttggccattctaacaggtttctaatatgttgacattttaaaatttgtatattataagagctttttagatttatataatgatattcaaattattatttataaaatattagggattagctctcttataatagacttatactttttaagtagttcttctagttccttaattttttgtgaatccttttcttcttgcatttcattcttgatttgtatatagcttcttattagttcatcctgaatcggcgaatcatcattattttcattaactttataaaataattcaagaattttttgtgaatcttcttcttgtaaaaccaatttaacttcaattttgaaatttaattgattggtttttaaagcttctttgttcattaccataataaaagtattggcgcacccaacatctttaaaagcaattctcccagcttctccttctagtgtatttactataacttttacttttctcataaaaagtcctccattttttaaattacaacttcttattatatctatttggtatatcttaaagtcaaagatttttgattttcttttattttattgcaattaacttttcttgcttacgcttccatactgtaattgttagaattacccaaacgattatatttactattagaactaatgttaaaacaaaatggaaattcaattttatattgatatagaacaatagtgttgtccaacaaatggcacaatgtaccgtaggaacaaataatgtttcatttttttctccttttccagtaattgctttatggaataattttgtacaactatttataatggtaggaaaaataaggaaatacattcctgctttttcaaataaagttgcatcctttgcataagttagtgatatatagctacctaataagccgcctattaaaatacttgtaatatatataaactttttcatcttattttctccttttatcccccttcttaaagaaggagggattctattatgaaaagaacttcgtacaaatatctctataattcactttaaaaaaattccctttaaagaatgtgtatatttctgtaaagaacatatcttcaattttcattaaatgaggttctattgcatcccaaacacgttctactttaaacatcttaaaatcctttaacatatcaaaatctgtttgttctatcacttctctaactgataacccatcaacaaaaacacccttatatacagataaatcgttttttataattggatataaatgttctaactgttcattatggcccacataataagcctctacataatttcttgctattcttattgtacccaggtcacatttcttcaatatttcttcaatagtgggaatcgctccaaatggattatcagctgaatacttaatgtatcccttatatattttcacttcatttgactttgaatatgaattaactactccaccattttgtttatttttcacatatactatttctctttcaaatttacaaatgtacagatatcccgctaaatgttcgaattctacataaaaatcattatggcgaatttctactgttgctgtaacagctctacgtttaaatgctacgtttatttggttcatatatatggcctctttttttcttaatgatttgttattttgtttgttattttttatctctatatttatctatatctttttaggtctaatcgtaacttgtataaaatctgttccatttagttcttgtactaaaaatgataaattatgttctctttcttttaactcatcatttataacctctctataatcaacctcgatccctttatcttgtaaatcaaagatttcatctttagcataatcaaaagcttctttaaatgtagtaaatacttccgcatatactttccttcctttttgactaacactaagattgtatgaaattgcaacaacgaatatattcatttctgtcttccgttatatcggtttggtatatgttagaggtaaactataatacacttttaaaaagtgctttattttcactataaaataatgatgatctaactatctcatggcggttataacctaattcccctgctatattaattatgccctgccttgttttaataattttatccttttgttcttgtgtcagtgcttcacctaataaaaatgttaaacttgtaacagcatttaaaaaacatttatactggttttttgtaagatccatattatttgaatccactttagttgtagcttcttcctcaaatgctttcacatatctttttggtgattctaaaataataagatttgtttctttaacaattgataattcattcatagttattcaatcctttcaatttttctctttcccttacatatataattatagcatattacccctcaaaaaatacagtattatttatcgtttttatataaaaacgataaataataacacaaaaatgattcagtttaatatttcatgttttaattcttagtggccatagtaagaattaaacgatagaattttatttatattgtaaatattactagaatgggggatataatactgaaatgaaagatattcaaaatgaattatatgagcaattaaaattagcaaaaaaagaaattacactgtttttaattagtggtgtgcgtatgacaggacgaattgtaggtgtagacaaatttactatccttatgatcgttaatggaaaacaacaacttatctataaacaagctgtatctactattgtttaatcctattaacgatccaataggctaacgtttgtttgttattgggcaaatagcccaatggggtatttgttttttcttttaaaaaaatacctggtattatccttcccgttgggaattatttttcccgacggggtgcgaagcttaacagcaagcccagagctcgtctgtcaagggaagtgggagaggctatacgattactagtcttttgttagttgagttgggatacgaggaagcatgacgagtaggtcatacgaaactcaaaagcagtaagagttgggctattccgcttcttgtcttgcccttgacagatgagctccccacctagattttgagcgtgaagggttcgggggtcccacacgttcaaagtcaggtgggaatgggcttgctataccaggtactttttttgccaggcactagcctggcttcctttaaggggtttaggttttgtttttcgggttttacgctccgtccaccttgttaagcgaaactcaggaacgtacagattgtaaaaaagattagctgcagctgccagctaatcttttttctacaatctgtagttatcgagttgagtaaaggtggagcggtggcttacggaatgtaggcagctgccgtacatcccgtgccatgagccctaattaagtagcaataaagtcatttcctttctctctgaaaaattattatcctccatagtcgccttcggatgcagcaaccttagtctgaataaacttttgaacctctcctggattagatagacctattgtaaaagttaaaatcgtaacgattcccattaaaccaattaatgttttcttcattttaatgcctccttatcaaatgctttctttctagcctgtaaacccaaatgaaaatacttactcgctttagaatgtccgtcttcttcataaaatttggttgctagcgcttcataatattcctggacattataatatagttcttctctttcaaaatatttaatcccttccaatgctacccgttcgaattgttcagcaggtgaattattgttcatttctcttaaaattaaattacgatttttatattcttcctggtgtaaatcattacaaatttctaggcctttttctattaatacacttgctaactctgtttgatttaatttaaagtgctcctttgccttaacatatattgctttataatgtttaggggacttttcgacaacttcagataggtaacgaatagctaagactgataggttttgagtcgcatacatccagcctaagttgtgtcggatcattataataaacttttcttcaccaatcttttgaaattgactcatagcagcagtataatgttcttcagcaagttcccactctttaagatatgtacaagatagacctaaaatattgtcacaaaaggcaacatttatttcgtatcctgaatagtgaatatacatatctttagctttagttgcatatttaatagataaaagagcttgctggatatcataatgatatgttgctaatttataataaaattctgctttctctaattcgtctggaacatattctaaaaaagtttcagctttttcatagtgttcttttgcttcaatataatttcctaattcgtttgagtgaatgcctttaaagaagttataataatatgctagaaagttatctcctggagcttcaaaagaattaattttttcaaaactatcttttgatatacctaaattgtctattaagtagttgtatcggaaatccaataaagaataatacaacaataaattttgatcttgtaacgcttcttctttttcattttttaatttttgaattttaatatctattttctcttttagacgttgggcattgcctatacgtctagctctcatttctatataccaagtatttaacaattccataaccttctcattactggttgctgtatacataaaatccctcctcatctcatccctttactacatagtaacaaaaacaaaattaagtaagtttattataaatatttctaaaaaatatacataattttcagtttttataaattaaattatttagctgatttacctattatatagtgactcacataaaaaaaagatagcatttgctatctctcttttacttgtatgttaataataaaaaatcttatactctttacattttataagccattgctttttcaacaatctttggaggtttatttgataataaaactaacgctttattatcaggcatatacatcatttctacggatgtaacgaggttattagatgctttactaaagtactctgcatcgcctatatccataattccaaatacgaatatttttgaaaaacaattcttaaccacttcaatacattctttataagaatattccataatagttacactaatttttttactccgtccagtattgaggatttttagtaactctttattctcaggatcatgtctaagaaaatcttttataaaaatgtgtattccagagtttgtactttcttctaggggtaccgccagcatttcggaaaaaaaccacgctaagaaaatcagagttaaaaaatcagaaaatatatcattattcaagaaatatatgacgtattataatcattatagatatcaatggaatttaaaaaagatgactcctgttggatacagaaaccatcttcttgatgttgcctaacttttttcaaaatgtcctttacaaagggtacagattacaaagggtctgcttttttatttgtttcctattacacaaaggcatcctctttcttcataacatttcacatttgtaaatcctgtcttataaaataggtttattaattcttcattcgttttccatttctccatatgatattgaattttaaaagtttcagcgaccaataaaaaggatccgtttggttgtaggacgcgaaatagttcttttatatcttgttccacatcaggccaaaagtagtgtgtttgaaaagcggttatgagatcgaagaagtttgtatgatagggaatagaagaaacgcttgcttgttgaacaaggactttttgtttttgaacatcctttatattcgtctgtatagaattttttacagcttgatcggagtaatcaatcccatatattttcccaagtggagttcgttttgaaagagtgtgtatcgttttaccgccgccacaaccgatatccaatatgattgcatctttctttatatgtactttttgtaatgcccaattggttagtctcgtatgtgcactgttcataatacaaagcatggaagaaccaattgtcccgcgaggcttttttgcttgctggattaatcgttgtaaaatactcaagttaaattctccttttatgtaagaatatatactcatttcgctttttataaattaaatcctttaaaaaaagcacgccgatagacggcgtacttctaacaatgcaaagccccttttaaccaattccgcgcccgatatgccccgactggaacttgaataagagatgtttcattcccagcatcaataccgtacaattgatcacatgaatttgtatcaaaacttagtaacggatgcccgcccatccccatagcagttgcagcaaaaacgagtttatgaacgaggataccagcttccatttggtgaatgcggtatcctctatagcctaatgcacgtgtatagtaatctttctgtccgactacatgtaagcaaagtggtacttgaaaaaggtttacgttatccatcgtcatactagactgaagtgggtagcgaaggtctccatatcgaattggttgtatggaatgtgttttactgttataagcgtaagctccgttttcaatatttttcacgctataaaaacatccgtataaggagacgcgtgtattttcatttgtatacttaccgtcaaggtcgttgtaataggggaaggaaaggctcgcttcttgtagtaaagtagcgagctcagcttcatcccatttcgttaaaataaaatccgcatcaggagaatatcgttttttacaaagttgtaggaaatcatacgataaccgttctacttttggtagctgtacagcgtacggattatgttgatagtgctcttcatgatgtagtgtttggaagtgtgctgttgattcgatcatagaagcttcatttatttttgttatcatcggatattcacctacatgttttgagcgaatgaaatgttcatgtgcgagcggcggaatttgttgcaacaactcatgagaagtaactgttttattttcacggtaatcattgtgaaaccaattagtttctggctctgtacttaaaggaataacggcatacacactttcttcaccttctgacaatccgagtaaatggttcagtgcacggtctagaaattgaaagtatacgccgtttgtataaccgaattgctttgcacattctagcaattgtccaatgaggaccccgctatctaatccttgaagacgatatgaaaaattattgtatttaaagaaatttttccaaaacatagtggatacgaatgcagcaccgaaacaatcatctatattacagcgattaccgagtgtgtctgccaaataagaatcgaaatttccttcgcgaagtaaaataagtcggtgatgtgcggcgtcataatggtaaatgccgtctgggtaatcgtcaatctttaaatagatatacaattcattcggatataaagcaccacccgaaggaatagatcttcgtaatacatttctctcgctatttagctgacataattgtgttacaccaaatgaataccaaaggtagtgaccaatctcatctaaagtaggtgtagtagaagagttcggtaaagataatgggatttctaaggagagcgggatggtaggtaaatttcgatataatttataaggaagcggtgcgtctttccagtccacctcatgattcggcataatttcatcgatagagaaatggagatgatgtaaaaaagtatctagctgcatgaaatccctcctttactatggaaacggatgtggatgtggatttaatctttcattcgttaaaggttcgtctgtatatccaagtgtcatcggtacggtatatacccggtccagtcctgtaactcgagtaagatggtgaccaaacgtcatcggtagcatgcctggaataataacttttacacaatgtaatccattcttttctatgaggggaacggtttgatctacaacgattatttcaagattagattgatgcaaacgatttaaaagttggtggagatcggatgttaaatccatatcaaatgattgtgatacattcatttcttggaacgtttgcaccggtgcatcttcccgtaaaaggaagtgaagacgttcttctgtttctttcaatccatacagcatactatggtcttccattttattaacgaaataaggatcttgtaagcatttttcgtagtattctcttttgtgctcgagctcatcgtctgttataagtaacatgcctgctatttcttgaatggcgctttttaaggctcgaataggatctaaatgagcgcctcctgcacaaacaacgttcattccattttcacgcgtattttttgcaattacccataagctaggaatgccgtgttccatcgtcgcgttaaaagcgtgtaattcatatccggtaatcgtacgtaaccgctgaatcattaattgtaattctgtatcatttgctgaattaagatccaggcggggaagaggtaattcggcataccaagtgagtaagaaggcatcacgctctacaatttctaaaatgccgtgaaaaatcgcttcttctaaactaccgccaattgcacatccatttgatgtttcatacacgaaagcatctcgatgaccgaggctataataagcaattgattcaggaactaaaagcggtctgttttgtgataaagaatatccccatacccagttttgctcataatcaggatcaaacggcttgaatggaaagttatcacgattgtaatgttcatttgtatggacaccgagtgtgaggggatttagtgcatgttcctctaaatcatgaaaactaccatgcacatttgtctttttccctcgaggcgacataccgcaatatcgttctaaaccttctaaaatagcagttgcttcactcactgcaaatgaatgagttcgtcccgcaacaccttcatttccgaacattaatggcatgtttataatgacgtcagcgaatggtaatacagaatgctgcatttttccgttcaacataccgacccgataatctaaatagtctctcgttaaaaatgtgtttagctcatgaatggaacggcagcgatacgtttcggtgcttacttttaaactcggttgtaaagaaacttccgccgcatccgcagtatcatcaggtaaattactacatacaggacagagaggatctggaagaaaagaatgccgcgtacattgtaatgtttgtaagtttagtaaaataagttcattttctaaagaagaatggttatgagttaatatttttcctgtttctgcgcaaataagatggcacatttgcaacattccattttgggtggcacgtacgtcacgtctcgttacattatctgctttaaaggcatatttccgctgtagttcccacatttctttttgatcaaagccagcgataaaacggcgtccatcagaacaatgggaacatccaggcgtaagaggatgaatgtaaggaccgataataccttcgccaaatgaagtaaaaccacgaagccatggaatatgatttgagcgaaaaataagttcggcatcatgatgaatagtagaaggagatccgtcatgtaatacgagagcgagatgaatattttcaggaagttcttctgtaagggtctgctgacgaatgatggaatattgtttgcataattgatcatgtacatagtctgcaagaaggccatctcctataagcaatatattttgaatcataaaccgtcctcctttgcaattaataccccatacacaccgtctaggttttcttttaaaaatggttcgattgctaaatcgaacacgaagggataaaaattatgttcttctaaatgctgtaaggcaagctgtaaagattgcacacttggaatttcttcttccgcttgtatttccactctaaaagaatccgtgtcatataaaataatagaggattcaggcaagatattagctctgtaaggaatttcttcattttgaacgtgaaagagtgatagttgtagtgcgtttcgtaacgctaacgtcatattaatattagatgcaccgtaccatctatcatttataccaacccaaacgactggaaaactgagaatctcttcactcattgcgattttaggtgtttcatggattgtagagagagcatcgtaataaaatttacaatgtttatcttgaatatcaattaaatcaacagttgtaagttcctctagaatatgtgactgccgctcatacagtttattgtttaaatgttgttgtagtgcccggtaaaatccttctgtcatcgtttctccagcaccgataccgatattgttatgttcaggaataaggcggtgaatgatttctgctacatatgtttcaattcctgttaaaccagcttctcggcgtgcttcattatgagtcaatccactacgagtcataagaggcagaaggggagctgggccatctgatagtggagtagctacttgaatatagcattgtgataatggtaattgatatgaatcttgttcatcccatacatggaatataccggcttctttagaagttaatgaatcgaaaaagcggaatacatcagttgaagtatgttggccataccgatgctcaagtttttcagaaatattttctatcgtatcaattgtaaaactttcatcagttgcaagagggtgttttataaaaggatgccacgttccttcaagtgtttcatagtttaataaaaagaattgtgattctttttcacgatatgaatcatccgcgacatgtttaaacaattcaaaaacgattacatttgctaacatggcagatgtaattggtgagaaggaatccgatgaattttcattttgtaaagtcgtttcatgtagccgatgccatgcggattcccagcattcatcacgattttctgttacgacaggtccagctataccgagtgttgataaacaaatagctggtatgaaattctttttcgtttctctacaaatagtgtgaactgtttttaaaccgtcaatgtctccgttttgagaaacatataaaatccaatcaaaaggttcgaatacttcacgcaagggacggtcaattgtagtatcgatttcttgaaggagtacactgttatcaacttcatatgcacgttctattagctcatgtattctgtcatagtttgtttcatcccgatctgtaacgaggtaatgaaatgtaggtaaaccagattctaataaagaagaaactaaggaagtgagcatatccccagaaccaagtacaaggacatttgctccgcggtatgtttcaaactttaaagcacctgaatgagaatcagcttctaaaaattcaatttgtgaagcatatctgtcgagtaatgtactgtttaattcatgaggtgcatcttgatttgcatcgcgaacgaaaccattttcatataaaatctctccaatttcaaatacacggttttgataggggagagggaggccatcggttatttcggctaaagaataattcccgttaaacattggcattaatttttcaatccaatcataaattccatcaccgtccatacgaaatgaactggcgttatttcgaaaatagacacccccgtttgaatcggggaggaagaaagtatccttatttactttaagttttgcatgaattggaaggttattcattttaatcctccttacgtttaggcatacattattaccttatgtcatgaaatttgtcccgtatgaacacaataaaaaaaggctgtagaatgattcattctacagcctttaatagatttttaatctatcaaccttctaataataatgactttggatcttcaagcatatctttaacagcaacaaggaagctaactgcttctttaccatcaacaatacggtgatcgtaagataaagcaatgtacatcattgggcggttttccatacgctcgttatcaattgcaactgggcgtacttggattttatgcattcctaaaataccaacttgtgggctatttaggatcggtgttgacattagagaaccgaacacaccaccgtttgtaattgtaaatgtaccaccttgtagttcttttaatgaaagtttgttgtcacgtgcttttttacctaattcacgaatttcactttcaatttcagcgaaatttaattggttggcatcgcgtacaactggaacaactaatccatctggagctgctactgcaataccgatatcatagaattttttaatgataagctcgtcaccttgaatttcagcatttaataatgggaattgttttaatgctgcaacaactgcttttgtgaagaatgacatgaagccaagacgtacatcatgttttttctcgaaagcatctttgcgttctttacgtaattccatgatcgcactcatatcaacttcgttaaaggttgttaacattgcagatgtttgttgaacttctacaagacgttttgcaattgtttgacggcggcgggacattttcacgcgctcaactggtttttcgaattccgtttttgcaactggagcaggagctggactctttggagcagctggtgcttcttttggtgctgcagcatgagcttgtacatcatgtggtctcacgcgtccaagtgggtctgtgctacgtacgtcgtttaagtcgattcctaattcacgagccatttttctagcagctggtgatgcgataggacggtttgtatttggtaacccttgtagtgttgcagtttgctcagcatttggtgccgcagctttcggtgcttcagtcgtttcttgttttggttgctcagccactggtgcaggtgtacttactgcaactggtgctccattagcatctaaaattgcgatagttgcaccaacttcaactgtatccccaggttcgcctagtaacttcgatacaatacctgaatcttctgcaatgatttctacattgactttatcagtttcaagctcaacaacgctgccacctttctcaactttgtcgcctacgttgataagccattgtgaaatagttccttcagtaatagattctgcaagctcaggtactttaatttcgatcattttaaatgtcctccccttatttgcctaacggtgtgttttttcttcttttgtcttcggtaatctccatttgttagcctggccttgggcagaatatctgcccaaggaacaagctagaaagcttcattgttactttttagttgctgtaaacttcaatttcttgtttatcttgacggaagttatacttcacatctaaagcatgtgcaacaattagttcttgctcagctttgtgagcgaatggatcgccgccagatggactagagcgatcaggacgtccaatgtagcctgttttcactttatctccagcaagttcgaacagaattggagccatgtaatgccatgcgcccatattacgaggttcttcttgaacccaaatgatttcttctaagtttttaaagcgtttaataatagattgaactttctcagcagggaatgggtacaattgctcaatacgaacgacatgaacttcgtctaagttgtactcatgtttaccagactcgatttctgctgctaagtcaatcgccattttacctgtgcttaaaacaagacgttttactttatttggtttcatgccaaggttttcttgttctaaagcaggttggaaacgtccttcgcttaactgactagcagttgaaagcgtaagtgggtgacgtaataaactcttcggcgtcatcaatactaatggtcgaacagcttctgttcctaagatagatgcttgacgacgcaggatatggaagtattgagccgcgctcgttaagtttgcaactgtccagttattctcagcagctaactgtaagaaacgctctggacgtgcactagagtgctctggtccttgaccttcataaccgtgtggtaatagaagaactaagccagatttttgaccccattttgctcttccagctgaaacatattgatcaaataatgcttgcgcagtatttgagaagtcaccatattgcgcttcccacataacaagagtttctggagcgaatacgttataaccatattcgtaaccaacaacagcagcctctgataacggactgttatgaacagagaatgaagcattaatgtttggtaagcgatgtaatggtgaatatgtttcatttgtatcagtatcgtgtaatacgatatgacggtgtgcgaatgtaccacgctgtgaatcttgaccagttaaacgaattggcgtaccttcttgtaaaatagaagcgaatgctaatgattcagcaagtgcccattcaattttgccgttctcttcaagagcatctttacggcgctcaagaattttcttcactttcggatatacgttaaagccttctggccaagatagtagaccttcattaattgcacgaagtgagtcaatctcaacgccagtatcaattgactgaataccttttgcaacaacatctggtactttaacgtgaattgttgcatcactcgtatcagctggtggtacgagtgcatagtcggattttaattgctcttgtataaactgtgtaattgtttcaacctcatctgcatttagaacaccagcagcttgtaattgatctgcataaattgctcttacagttggatggtttttaatttttttgtacacttgtggttgcgtaactgccgggtcatccatttcgttatgaccgtagcggcggtaaccaattaaatcgattaagaagtcttttttgaacaacatgcgatattgaatcgcaaggttagcagctgcaagacaagcttccggatcatcagcattcacgtgaacaatcggaatatcgaaaccttttgcaaggtcacttgaatatttcgtagaacgagaatcatagctatcagtcgtaaaaccaactgcattgtttgcgataacatgaatcgttccgcctgtttgatacgcgttcaatctgcttaagttgagtgtctcagatacaataccttgaccagggaatgcagcatcaccatgaactaaaattacgaatgattttgaagtatcttgatctggaagaccagattttttacgattctcttgagccgcacgtgcgaaaccttctactacaggattcacgaactcaagatgactcgggttatttgctaatgtaacgcgagtactaacttcttcgttactaacgacttgttctctacctaaatggtatttcacgtcgccagtccagccagaattagccactgcgccttctatttttgcatgtttgaactcagcaaacatgtggctatatggtttttctaatacgtgagcaagtacgcttaggcgaccgcggtgagccataccaatcatgacatcctctacgccgttcttagcaccttctagaacaatttcatctaaaacaggtacaagcatatcaacgccctcgatagagaaacgtttttgcccaacgaatgttttatgcaagaattgctcgaaaccttcaacagctgttaaacgttttaaaagagcagttcgttttttatttgatagtggttgacgcaatgaatttgattccaccatttgatgcaaccacgcgcgttcttcactatcttgtatatgagaaaattcataagctaaagattttgtataaacgtcttttaatctatgaattacatcaagtgcagtgtgaataccttctggtgcatcttgccataccgttttcgctggaatcgctttcaagtcagcatcgctcagttcgttcattgctttctcaagaagagattgtccatttgcagcatcttccatcgggttgatgtgagccaacgtgtgcccgaaagaacgaatctgctcaacaagttgaacgactttaagaattttttcaatgttacctgtgttttgaggagaaaaatgtgttgctgtgttgtcccctgttacgacatcatcttgaaacgaaggagctccaaaaatttcaaaaagctcttgtaattccggatcaacagaacctgctccagttacgtaaagatcatactgctcaataacataaccaaggttcggaccgtggaacttggcccaagggtttgtcgttgtattcttcctcgtcatttgtttaaacctcccaatgcatataatccttttccatacaaaggtgcattttgctctttttcaataagtaatgaatcaataatcaatgtaaatgtttttctttactcttatgttattacaataatttacataataccaaacactattacttatctgttttgtaaaaaaacattcacaataacttatcacccaagttaatctttcatgttataaagtaattttacagaaaaatggggtggatatatttggtatgcctatactaatagctataattgttgcatttaaatataggtataatagttagaatgtttcgataaaaacagtttgaattatgtatattgaaataataagcgctttcatagatattatacaacaatataacggaatatagtataaaaaataaaaaattatgaatttatcgtaaactttatttagatagtgttaaatattgaaaggaaagtgaaggatttctacaaaaaaagttgctaaacataaaaaatgctccataaacagttagtttctataaatatgacgaaaaacaccgtaaaacaaataacgcatttcgtgaaataaagaaataaatgaaatattttaaaaggataaaacaaatatggagatattaaattttaaaaaaagaagtgaggagatatagtaacagttatttacagtgttccgtgtttcgcttcaaaatagacgtgctgaaatttaaaaaagtttcttctatataaatagcgtgaataataatcaaaatatatgtaaagggaacttgacgtaaagtttactttacatatatactcggtatatggaaggagggagaaatttccttggaaaataaaatggtcgaataccgaaaaaaatttggactatctcaagaaaagttggctgagaaacttggagtttccagacaaaccattatctcaattgaaaaagggaaatacgatccatcacttccgctagcatttgaaatagcgaaaacatttcagacaacaatagaacatgtatttatttatgaaggaaaagaagagggggaatagggatgaattattcacaaaagtactttgtaattatggggattatttttctatttatgagtggatttatgatattaacaggtataatgacgcattctgcaccgccagccataacgtatccattgctggggatgatgattatgtgtttctgtctaagctacttgcatccgcaatttaaagaaaaagacgagcgaatgaaactgattcgttataaaggaatgtttgtaaccttttttgcattaacggcatattatcttcttttctctatcggcttaaacttaaaaatacttacactatcagctactgaattattgaatatacttatggcacttacaatgagtaccgtctttatctcatttgttgttttagcaaaaagatattaagatggaggagagaaaggaagattaacatatgcaaatgatgtatgcttttggcattgggcttgtattatttttagccgtattcttatttattcgtaaagacgttcaaggtgggacgttaacgaagcgaggattttataaattaatcggctgtttagttgttatgcttatagcaattattgtaatgatcgtattaattaatcagtcactatagaatgtaaaaacggaaccttacttcggtaaggttttttttattattaaacctaaaaattaccaccaaatccatttaccgtaaataatttgtgttatataatccaatgaaatgatagataaggagtgtagtatttgaataaaagaactatcttctatttattaacttgtatactactggtagctagtactacttatataatatgtaacaaaagagaacaagtgccacctatattagtatgggacgaacaagaatactatgttacgaatgaacctgtcaaagtagaagaagttgggcaaaaacttggcgaagtaacaaagaaaattaaaacaagtaaaaaacctactaaaaatagagaatctaatacattacaagagaaaacagaagtattcataatgattgaggaagaaaaaagtgattacccgcctttaatcataaaggaagcttatagtgatgaatatagggtagtgaggccgatgttgaagcaagtattatgatgaaaaggaggttcatatgcagacactaactccgcatccgtagtcgttaagaaaaatatttgtctttttcctcctatcggtgccgcttacattttgatgaatagaggagcaatacaaaagagagattacattttatatttattatttgctactatgaatatatcactctggttatcgcttatgatttttgatcggagtatgtggatggtagcagggcattatgtgtttggagcagttgttgttgtttcgaatatgaataagagataagccagcaacctcaaagttgctggtttttattttgctatttataataaagaaacaaatttttaatagagagtagtgggcgttatgagatggaaagagggaacgtttgaaaaaatagacacgaatgactcacctgttgagcaacttataaacacgtttaaggaacaaaacttaattggtggagcaataataagctgttttaaagtgcataacgaaaatttttttaaagaaataccacattcgaaagatggacatgagcacttctttagaagaatcttcaactctttagacataatcaataacttagaagagttaaaaatacatacatcagacaaatataagttttgttttaaagagcagctcgcagtcatgcttgatggtagcattgctgcgcaaattttgtggggcggagcatatgaagggtttaaggaacgaccagttatcgcaaaacaattagcagtcaatgtatgtcaatatatgttccaagatcgatacgaagatattaaagtgttcgaaagctatcgcccttggacagattggttttacgatgttgcgtgggatgttacttggatggtgttagatagtagggaacagaaaatgtggttcatttgtgctacggatacagattgatagaagccgggccttgtaggaatgctgcaaggccctttatcttttgggaattaatagaaaacgaatcatataaatgatatactaaaaaatgtttgtaatgtcagtttcatactattatataatgctgacttactagaaaagataagaggagaatgagcgtgcaaaagataaagagattattgctattaatgatggtagtaggattaacagcagttgttttagcagggtgtgcaaatccgaaagatactacagaagaatttttaacagcgatacaaaaaggtgatgtagaaaaggctcgtacatttgttgagagtgacaaggaatttaataaactaaatgaaaaaacagatgatgctgaggcaaaagcaatgctaagtgcaattacaaaaacctttaaatttgaaaagctagaagaagtatcgaaaaaggatgacaaagcagaagtgaaagtgaaaattacatctgctgatctatccgttgctgtaacaaaagcagtgggagaagttatgccaatggcgttcgctagtgcctttagtgaagacaaagaacaatctgaaaaagcaatcgaaaaaacaatgacatcaactatcgtcaaaaacttagcagataaagatgcagcaatggcaactcgcgaagttacattgaacttaaagaaagacaaagatggcgactataaaatcgttgctgacgataacttgaaagaagtattgtttgccaatgcgaagtctttggagaagatgtttggtgggaagtaattgaattagataaaaagagacaccatatcacgtagaatggtcatctccctgtcaagtagacagaaataaaaagagtattatgccacggccttttcccgatattctatcggggaaaggccgtgaagtttttcttggaatcttcatgtgttgaacaatcctgaatcacctattttgccattaattaatgtagaaagagttcgtgctattgcagaaggaaacgacgaagtaatttcaggtaatgatgcaagaggtataatagattatttacttcaagttaatagttggcttcaggaatataatattaaattagtatggtagatgtaattttcaaataaagagaatagctgaaacattaatgacctaagtaaaccgcatttccaatggattagatagttatctaacaattggaaatgcggttttataaaaaataataatatgtttataaatgtaaaacctacggaaacttttcctgtgggttttttaagtagtttttacgaaattatgagtgttttttattttgtatttcaataagttcatcttgtaccatttttatataatattctttttctgttagttcaaatataaataatgcttttttccagttataaacaacatcttctacattgtgttgtttaatctttaataaacactgaccttttaaatagaatagttcacctaataggtataaagtatttagattaattgctaatttgatgcccctatcaatgtattttattgcctcttcatgttgatatatgaagtctaaacattttgctaaattgaaaatgatttttaatttaatttctttatctctaggaagatctaacttattaaaattagttaaacatctttttaatatcttaatacttttttcatattctttgttttctccatgaaatatagccattgtctgcataatatgtatttctctttctgataaaaaatcagaattggttaaagttagttttaatgcatgatttaaaagagttaaagcagtttttgttgatctatttacctcaaatatagcgatcgcttcatgccatattagaaattgtttctcttcttttgtttgaaaattatttaagtttttctctttttttactatttcataaagttctttatattgtttttgctttaagcaatcttttattacatattttacattttctgtatattttaatcttttgttttgagttagtgcaaatatatgattcggatcaatgccaagtctttctgataattgatataacaatatgctagatggataaatcacacctttttcgatcttgctaatttgactttgtgaacaaattccatgacacaattcggattgtgatatgtttttttttattctaagttctttaatggtaatacccaaatcgttaaattccattttttcacctactatttagcactgtattagtataagagctttctctaacttttaatgtaatgtaaaattaatatatttacaattattatttgttttaaaggaattaccgtttccataggatggtgaggcttttattatgtacaaaaaaagacaccctaaggtgccttcctccgacttgaaccacgttcatttagtataaacttatccgtattatccctttgttatacgtgtaaacacaccctataaaacagaatcgtctatatacaccagattgttagtttacaaagtacaagagatttgagatcagtattagagtgacgcgacaccttccataatgattggtatgttacgcctttcaaaagaatctgctttatagaatgtatccacgtttattattttactatatataaaattcattcggtgtattttttccagatatgtataattgcataaagttgatgggaaaatcagagtataatttggattgtgtaataaagataaggcccacctacggaaataggtgggtttttgttgggtattactatctcattgcacacaagggaatttctattaaaatcatagcatatttttatagttcttatattgagaaataaagaaaagacacccaaataagagtgtcttttcccatagttttttagcagaagcaactgcatccgataatgattaaaagtataaagagtacaacgagtaaagcaaaaacgtactattctacattatctgaattaaaggtagctacgaaaaatagaagtattcctgaccttgtaaagaaaggtattgtagatcgagaaggaaatggatttactccaggtgatgatgatacattttatgtaatgttcacattcgtagatagcggtgaagaccaaaatgtatttcagggagatgcattgaaattaaattgaacgtttaattccatgcaagcaagcggtgaagaaaagtaagtgtaataaatttgtatactctatgtttaaaattgtaacaagaagcataagatggccgttttgatcaacttattcctttttagtttgcggccaacgtatgctttcgactccgttgaataattaggtaatcatctacaaaaacgtatagtatacaattaaaagaactgttttaaaattgaggagtttatcgtgaatggtaaatattctcataaatatatgggcgagaaaactgatgacgatttccttttttttaatacatcgtaaaatatattttacgatgtatattgttgtatgttggagagtataggaatattaaataattatcctgcttttgagatatcttgaggggattttactcgtaatgtggaagaaaaacagttttggaaggtgctcaattatataccatattcattggtaagagagagaaaagaagtaaagaatcatgaatgaaaagggggggatatactatattacgacaaatgaagcctttgtatatgtgaagtagaaaaagtaaaagattacctgtaaagggtggttgaaacttggtcttactatttatttttttaatctctttttagagttcaactatttgtactagctattctataggagtaaggtttaaagcacgaaaataaatttcggtattatatgtaatgagttcttcttttttatgaacagataaaccactttgtaggatagctgtaatattgaactactcaccacttaacgtcctaacggactgtttgaagtgggagattcctgcgaacaccgatgtatccatcagttatcttagcaggctctacccgcagtccctacggtgagaacataagtatcttgtacgctgactcaccacactccctactttagcttggttttcgcgattttgagaagcgtggggcgatagaacgttgaagattttacggttgcaacgtttttctgcaaccaacctcatatcttcagttttcgaagagcaatctgtacaagtaaatgatagcaaatatgttggcttatgccaaccgacattcatctcccacctaaaattggcgtttcacaccttcacatttttgaggaaggagtcttctatcggaaaacgataaaactactattttataggaatacatttccgaatgatctattaccatcaatttaatatttttcaagtttcccaaaaactgaagtaattactaaagtctttataaggaaatagaaagctttttaaatcttgactaatatcttctagattcccatatatattatctgctgctaaattaatgtcctcattaaaattatatagctgttcatctacataactgaatccctcacagcaattattatgtatcaaattagatataaatggttttattttcaatacattttcttcatttaggataaatttatcccataacagccccagtattatttttacgggtaattttttatcatacgttccttttacgttttttaatttaggtacgatgtcaaccaacttatcattactagatagagaaacttctataatttcaatagaagggctatctaatgcttcaattgtctgatcagcccaatcaattatttcagtttttgaaaataaaccaatttgtaaccctatactcagaacctcagctattattttcatattatccatatataaaactccttagattttctggtaattatacatcgcagtaacctaaatttcaaaaggttgttgctagtatgcagtaactaaagggatttttaaacctaggatatctccacattgttagcaagataaaaaacaaaatctctcctaaaacgaaaaaaagatgaacaaaataataaaaaaggctcatttctatttcttttttagattccattccttagtaaaagaacttaatagatgaaaaggttagattgcacaattaattgggagatacgtacaagtaactttgaatctcttgaacaaatagttctaatttatcatatacagaaacagacataaaaaaaacatcctttcctatgattctacagaaagaatggcctgttttaatatttgtaggatagttttaaatacaaaaatatagaattgtgcaacttataaatgacttaatgtaaaatatatattgcatttatgttattaataatttaatatataaaatataagatttatggtatgaagttatgtttacaagtgaggtgtatttaatgtccgtaagtaaagtgaagtttgcaagggttgaaaaaggtctgacccaacaagggttggtcgatattgtaaatgttacacgacataacattagtattattgaaagtaataattataacccttctttaaacctttgcattcatacagctaaaacactagataaaagtttagataaattattttgggaggaattttaaaatggaaaaactaaaaaaatggttttcactcagtacacacccagatgaaagaattcaacaagtcgaaatgaaaatttgggctcaatctggaattattgtcctacttatagcttttgttgattttgtaataagaggagcatatctacaccgtccatttttagaatgggctgcttcattagccattataatttgttatatgatattcgtttttattaagtctattctaactggtgtctatgaaacggatattaataataaagaacaattaaaagaaaaattaaaagaaaaaatgaacaatacctttattttttgttttgtcgcaataggtgctaccacatacaaatataacttacctgaagatttcgttggatggttatcagtaatagcaagatttattatacttttcgctttcttatttggtattcaatatcttattacagtattagcatggaagaaatcaaataaaatttaataagtatagacaaaaaagcttatcttttagcacttaatgataagctttttattatttttttcatcttttttcgttttggtgtacaatgaatttcttagcttgatagcgatgggatagaaccacatcgccatcaagcggaaattttatagtaccccagaacaaaatttcgtgctaacttgtaacaaaaaaacatgtgaaattgcccatagataactatcttatattaattacataaactagtgtgtgatataataatataaagatattacatttaaagggggattcaaattggttaaaaacttacctttactaatagtgattttactacttggtataagttcttctacgttaagtacgaatggatacttttctccagttatagaagggtctttaatgattataagtattattttaaacattgctgcagtgataggtttatcactacacgttcttgtataccaacctatgaaaagatatgaaacaaatttaaaagagacatttaaataaaataattatattcgaggtaacaacccatcgttattgagctgaaaaatgtatccataaaaagaaaaaatacgctattctttctgtagaatcataggaaaggatggcgttttttattttagggagtattttgttctgttagcttgatggatgtgtggcggtaccctatcactatcgatttaaaagaatgactgccacgttttatgcaaatattaatttgttttgattgaaaatagattataaaattaatatttaaatataaagaatttgaatattagtatgttatcatttaaatgattcaaatatgtagtacaaagtcaatatttgtagctgagttcgtttatacatatgaaagaattaaattatgaaaaggcggtatttattatgaaagcaattaaattagcaggtttaacaattgcagcaggtttattattggcagcgtgtggtactgaagaagcgaaaatagagcaagacgttaagaaagaggaacaaaaagaaaaagttaaagcatttcaggcagaaaagcagcaagaagataggaaagtaactatgcaacaatcgacggataagtcaaaacagcatgaaaatgtagcaaaagaaacagttaaagaagaacaaaaagcggagtcaacgcctgttgaacaaccaaaagtcagcgggttaaatgaggcacaagcacaagaaaaagtggaacaatcgatgacagcacaaggccagggagcgcgtaataaagatgtgaaattaagccaattaggcatccaaacagcaaaggatggaataaaggtggctgcacaggcgcaagacgttcatattgaagcaaaagacagtctaactcgaattgttgttatcgttccagctggaacaacgaaagaaagagcgcaacaagtaggcaacatagcagcgcgccaagtggcaagttttggggctatgggattaaatgtagatttgaaagcaccatcaaaagactatttaggggaatattgggagaatttctctggtgatatcggtatctatgacagtaacgaaaaacaattagtacgtggatatatttccaagttaaatccaacaaaaattaaatggtaagaaaaacagagtccctacacaatgtatggggatttttccataaagaaaaaaacttaaggggtcttcggacgaatcgaattatcgtacagtaatgcatgttaattaataaaattaactatacaaataatttattatatatccatgtaatctagctgatataatatgtaagggaattattggttaattagtgatgtatatatgtaagattagggggatacataagtaaagttagatgctattttggcagttgtagaaatactcttcggtttttttgtatttataataactttatttgcttatcttttttcaacaggagaagaaaagcaacaagcaaaggaggatttaaaggagctttctaaaactgctctcatcccatttgtagtggttgtaatcgtaatattattttttgttgttaaggtgattgatcatgacaataaagttgaacaagaacaacaaaggctacatgaagagaactaccaatgttaccataatgatagtaattctaatcttgataaaaatctggaacaagatattaaataatatagataagaacctcgctatttctataagatggcgaggttcttacgcataaagaaaagacactctaaggtgccttttctaatagttttttagcagaagcaactgcatccgataatgattaatagtataaagagtacaacgagtagagcaaagcctccagcaaaaccgcagccctcgccgcaactaccaccatatcccataataatagttcctcctttagataagagaaaaagactagggggtcattccatgtgttttaatgggttcactttaccttatgtttttacgtatgaattgagcaggtccttttgaaaataagggagagatcatttaatgtgcttccccggaatattgattacctattttctaaaaaacaaactatttaattatatcaataataagatagattaatataatgtattaatcctaacagaagggaggattagccatgcaattagtttgttttaaattagtaaatggtcaatactttttagttgtagaaggtatcgaaattcctgcgccaattccagcgtttgctgcagctttattaattggtttaggagtaatcccactttgttcttaatttaaagaatttcaaacagctctatctttcaatcgataaccccttaagtatatgaatgcttgaggggtttttataataaaaaaagaaaagacgccataaggcgtccccacaattaggtagataagactttagttttccaatctaaagaaattttgtatcagttctttgaaaaaatatcataatatccaattgagttattatgcattattacattcttctctcaaaccttctagattctatttgataaaatagaatcctaatattactaaaaatcaaataaatgtttctaaaaaccctaaatatttataagggtaacaaaagtgatacatttaaggtgcaaattataaaaaatataaaaggagggtgaataaagcggtatttaaaaagggctattataaacggtgagcagttatacagtatatgaacctgaatcttgttaaaaaatgatactcatttgagtgtactttctgatttgaaccaacttgattaaaataatgaaaaatcatcatttgtttattctgatttctggaaaagttttaatagtttcatgctgaacaaacatactttttagaaagaggagagattattgatggataatcaattactatatcaacagcaaaaaagagaaaaggcacttgtgattggagctggtattgcaggcttacttactgcacgcgtgctttccagttattttgagacagtgatagttgttgaaaaagatgagttacctcaaaaaccatctgaacgtccaggtacaccccaagactttcatcctcatcgtgtattaccacgtggagaaataattatgaaccgtttctttcctggatatgttgatgatttattaaatttaggggcccataatgtcaagaatgataaaatgattcgattttctccgtatggggcactggaactagttatagaacgaaaaggtgcagcaagcagtcgagcattgttagaatggacaatccgccaacgtgtgcaagaaattcctaatgtacatttttattcaaagcaagcggtgacaggccttttagcttcgtctgatcacaagcgtgttattggaattcatattcaagaacgagacgaattaaaaacaaagcgaactgtgttaaccgatttggtagttgacacatgtggtcgtcaatctaaactcaataaatggcttacatctatgggctatgatgttccagaaccagaacgtttaaaggtgaattttggatatagcacgagatattataaagtaccttcacatatcaaagagaaattgagtgcaatttctgaaggagatcctgctaaaaacgttggagctgtagggttattatatattgaagataacatagctcaagcgctactatttgttgctggaggtatgcactatccaccaaccaattcaacagaatatgaaaaagaactggactcattagttacccctatgatgagggagttaattaaagagttagaaccaattagtgtcccaagaggatttagagcgcaggagtcaactcgtcaacattttgaacaaatggaaaattggccatctggattattagtgttaggtgatgctttttgtaactttgatcccatttatggacaggggatgaccgtagctgccattgaagctgaaatgttagatacttgtttaaaagaacattctactcataaacctggattcgaacgcaaggtgctgcaacgtatgcaacaagctattgagccggcatggtggctgagttcaattgcggatttacgttggaaaggtgttgaacatgtaggagctgttccactcaaaggtgtgaaatttgcacagaaatattttgctttatatcttaaacaagctgcaaagcaagcaaatgaaggtaattcatccatgctccaaaaatatataatgatgaatgggctagttcattcgcctcatgaaatcattaactcagatatgttaagaatgttaatcaatggagatgagtcttcagaagagaatgaacttttgaacgaacttggagaagtagataagaaaccaatgcaagaaagaatacatgaactaatcccttcctttacattagcttttgagaatagcgttccaaatctgttctcatccatttcaatttctaatgtcaaatgaggaaaagaaacattgctctaattagggcaatgtttcttttattagataagcagtatttaatcaactactttttcaattgttggcattatagcgattggtggtaaagagtaagtccaagcagcagcgtatacgtttaatttttcacctaatttgtagttttcaccattggatacaggtactcttaaaattttattttgggaaactagctcccaccaattattctgataataaagtgcttcttctttcgtaaaagtatcagcaacaattaagtaattatcgtctgctgaaataacatagcccgtgaaaggtatttgtattcgtacctgttcctccttaattggagaagtgttattggctgtatccgcagaagcaggtgttaagccaaaagtaaatccgcaccctaatgttaatgttgtaactactgttaataatttttgtttttttgaaaacataatagaaagcctccttaaattttattaccacaccaacacctttctattcatttagatataaagcctttctgcattcaaatatttaacaattttgtcataaataaaacaaaattgtatgtgatatgtattttttagagtgatttatgatataattcactaggtaaagtattttcgtggttcatctctatatagttttttaccctacttactctgtaaaatattattggtgaagagagaatgttttctctcttctttttttatttgacattaataatatcgttaataaagtatgtttaatattttttaggctattttgttgttggtaattagttttggtacgtataataaaatatggtttgattaagagatttagtcttgacgtacagaatttgcaaaatgttggtgttccgtctttatttacatcaaatgttaaatgtattctaattttaaatgaattcaacataatattttgtatctataatcccaaaggaaactttacatggaaatgaaatttttcctgcagaagcagcctgcatacaagaaattacccaagattccaattctaaaggcaagcggtatacttgaatattaccatcactgttttttacagttacaatcggtgtatttactctggttgtagcaaaatcgtccgttgttatcattcttactgcattattagtgtgaaaaccagtgtttataacttcataaatctgtccatctttctctttaataaccataggtatatttaaatagggatagtttttaatatcattatgaataattgctcctactgcattctttcttatttgaacctcttgcattcttttatgctcctttataatgatttaaacatgtttacgtaaatttattttattttacatctatatctaaagctattttgctcattaaagggttagggtcaattcctattgtgcattcgatctgtgtttttgcatatatttcacgtttaaatttcaacgcaaattgatagggatcgttagtaaataaatgaatgctatccgtaatatccatgaagaactcgtcgatggaatattggtgaaaatcctcaataggaacgtactgcaaagctaactttgttatgtaattagagcatttaatgtatgttcccataatcggatttataataagaatgtcttttcttcgaggaatctcgtataatctggccatcttctttactcccaattcttttaatgggggagtggcagctaatacgaaagaaccgtttctatttacatcaccgactactgccaattgtgtatacataggatctaaccccattttgatgcaacttatagaagcgtaaaagctacgtaaatcaacacataagatgattctattcggtaagatagaatagtcatacactgttattccttcctaaacaaaagaacgtttgttcttattatatacgagcttgtgttcttttataaagaggttttgttttaaaataattttttcagatattcttcttgtgggagcagcagttctaacaacaatcagtaatagggggcgtgacatatgtccatcaagctaaaattttaacatacccacaaaaagaaaatttttatctctctacaccaatttatgacaaatcatttttttcatttttaggataatgaatttcttaacttgatggcaatgacctaacattaaagtgtatgggtgatttctattaattaatatatcaaatttaataaatgtaaaattaaagcataggtgtatgataaacgtatgtaatatccttcattatgtcctaaatgtgccctggatttattagtatttttttgctaaaaccatactaaataaaggccgcaataaaaataaaggtaaaatgaacagaatatttaaaattatatatatcaacttatttaaaggttaatctaatgtaataccatgataccatggttttacattagatatagataattttggaaaaggggaagattctatgaatgttcaactagaaaatgaacaaataacaaaattattaaacgactggtatcaatccatgttaaaacaacaattagttaaagcaaaacaattaaaagagtatatagaaaatgaaattaacaatgtcaaggaaaatcaaaacgtactcttatattattctttattagattttagatacaaagcattaacagattggataagtattaacgaaagcagttttgatgaaatggataatttcacaactccagcagatgacttcctagcttattattatcacttctttaaagcattccattctactttaacatccaattacactgaagcaagtgaacactatgaaaaagctaaagaactattaatacacattcctgatccaatagaacatgctgaatttaattatcgaatggggtatttttattatcaaatctataaacaagtaatagctcttgattatataaaattagctaaagaagagtttttaaaacatgaaggttatgaaataaatgtagcactatgtgacaattttataggtctgtgttgtattgatttaaaacatttcgaattagctgaggagtcatttaataaggcactagacacattccaaaaaaataaccataaaaattctatccttatggtaagacataatttagcttggttatattcaaaacaaaatttatctaaactcgcgattcgtcatgtatctgaagtaacaaagaacaatccaaaccatttcaaagcatttttcgtagaagcatatgaatactataagataaatgaccataattacagcgatcaactaattcaaaaaggattaaaacttagtaacgattttaacaatcaagaattccaacatcgttttaaaattttaagagccctcaacaacaatgtccctacattaactttagaaatatttatttcagaaggtattacttatttcaaacaagaaaaactatgggaatgcgtaaaagaatatgctgatatcttagctctaaagttttatgaagaaaataaccataacaaagcaagtcaatatttttatatgagcaatacagctcaaaaaaatgaattagaaaaaggagcgttaaaataatgaaaaaaatctatctaactatacttggaatatctttaattagtatcctatcgttagggttaaacgactcttttaaaaatcaagctgtaaatataggagacggtggaggtgcaccagcaagaccagattatttattacaaacacacgctgacttataagaaaaaaacaccttcattcttgaaggtgtttttttataatctgatttttaaataaatgaaaaacggaatatatcaaagttctctaagttaacaacatattccaattattagaaaaatattaaaaattttaattttttgttctattatggaaatggtgaaaatgtaggggctttagacctaaattcaaaagatggaaaacttaatcagatgaaattattcactgatggaaaaagtgaatcaatcttaaaagaaaacaatgcaaaagcaggttactgggaagatgttcaacgttgtattaaaaacaactggaaaactatgcctcaatgggctaaatgggcttgcgaaggtgcatgtggtggttgtcttggatgtctagctggttacgcaattggttgcgctgctagtcaaatataaaaagaagggtgtgattcctcaaatggaaatgtctaaaggaatactgttttatagactaacattgattattgcttgtttggcagtagttgccttcacatatccatctgaattctctaaattcgcattaatcgcaggtattgttggtatttttatcattttagccaagaagactccttcctcaaggagcgtgaagggtcacagttcagtgagtaggtgggagatgaattgggttcgaacaagggatggcaggaagccatcttaattgttcgacatatagaaagtgttactccactacctatcgaatgtacgtttggtgtataatagtcatataccgaaatggaggtgaatcaaataatgatgaataaagcctataagtttcgtatctatccaaatcaggcacaagcaattctaatcaacaaaacgattggatgttctcgctttgtattcaatcatttcctatccttatgggatcaagcatacaaagagacaggaaaaggcttgacctatggtacatgctctgccaaactacctgccatgaagaaagagcttgtagtcagtatggagaatccaattgaaaatgtacatatttattcaagcgttaatgtacatatttaagttagcatttatacctcttggaaatgcgatgatgaagaaaatcgaaatatacgctgggttaaaggtttacgagaaagcttagatccttatacactaggtgactatgtgaactggcccgatatcgatattaaaaattggcaaactagttattatggctctaactttcacagattacgtaaagtaaaaaccatgtatgatccttgtgatgtttttcatttccaacaaagtattcctccttttcatacatgaaaaaaggggataacataaaaaaatcatccaatataccgttacctcgcagtatgttggatgattcaagttgattttctatatcgtttcaaattcttgctcctactcataaacttttacttacagattaattgtatttcgtatcattttcatgcaatgaatgtaatttaatatttggtactttatctttttcaatacctctattataagaaacaggaacttgaaattcgaattgctttgtctcatgtttttgtaaatagactggtttcggtactggatagctttttgaattctcgtttgcattatcgtataaaacaacttttaatgcttgtgaatgattacgataattttttaaagtaacaatgcacttcggttggatattctctccatttttctccattctacactggctatcttcttttttatattctattgcttctacccctgtttttcctgcgtagtaccatgttttattcaatgtctggaggattgtatttaaaataaacggcatcattacaatcaaaatactaatgcctactacttttatcttattcgtttttctaaatgtactagactccttttttcctagccattttaaaaataatataaatgcaattacatgtagtatgaaagaaacaatcaatatatttgagactttataatccatataaacatacgtatgtatcggaaccttatagacattgaatagtttttccccaattaattcattatcatttggaatttttaataataacaaaacccctatactgtaacaaatagctactaatcgatcatactcaatacgaatcattctttctccccttcactttgtattttattatcgattttagctattattaccatactatacaatctttttatagaggataacgtaaaaaagttccttataaatatataaagaaccttattaatatacactatgaattaaaaaatcaatatacaattttcacatagagatttcttcaaaatatgttggattatgtattgtaatttttttatctaaaattgtaacaatgctatcattttttaattgttttaatacgctgctaactgtctctcgagatgttccagatattttagatatttcaattgttgtaagtggacatgaaattacaatcttttctccactctgttctcctaaatcctgcattaaataatttaacgtttggataacacgatcttgtgcattaggaattgtaatattttgcactcgattttcgttcaattttaatatagatgataattgctgaacaacgtacatcaattgcgttctgctggactttaccatatcttcaaagattaccgttggaatataatatacctccacatccgtcattgcttctgctgtatagttatatcctctgtctgtaaacataccaccataaggaaaaatagaatatcgcttcacatagtcatcgtataataagttcccattttgattaacccgctctaactttacaaaaccatctaacatgaagtaaattctttctcttgaatccccttctaaaaataaaaattgaccttttttataagttcgccaataaacaaactctgttaagcctttcaattttttttctgttaaatgagcaaataattcgaactgctttaagtctttcactacgttccgtctattcataaaattccctctctcttgctgtatgttggagcgaaaaaatcaagaaagcgtattcaatttgaattttatcataattaacttacatattcagatttcatcatgaaaactttatgaacaatgagtacaaaaaatattaataaataaaaagaatgaagttactaactccattcttttttactactaagtagcgtacataagaatttaaacatacatgcatacattctgttttgaaataatagtaccagctttttcttctagtgcttcatatactttttctaaagacgtaataattgtttttctttttggatttgtattaacaaaattaatagcagcttcaattttcggaagcatgcttcccgcagcgaattgttgttcttcaatatattcttctaattgattcactgtgacatgctctaattttttttgattcggttgattataatttacatacacatgatcaactgcagttaaaataacgagcgtatcggcatctactaattctgctaatttctgtgcagcgaaatctttatcgataaccgcttcagttccttttagcccttcttcggaatcaattactggaattccacctccgccaacagctatcactatatttccatcttcgaccaaagaattaatcactttatgttcatgaatacttacaggcttcggtgatggaacaacacgtctccatcctctaccagcatcttctttaaacactgcttttgtttcatccattaatcttctggcctcttcttctgtataaaaaggaccgattggtttagttggatttttaaatgcctcatcttttttatccacaacaacgcgtgttataaccgttgctacgtctttttttatattccgttttttcaatgccttttcaatcgcattttccatccaatatccaatcattccttggctcattgccccacaagtatctaatggcattgcaggtgtcttttccgtttctgcagctttttgctgtaataaaatattccccacttgtgggccatttccatgcgcaattactatatccacatcattttccattattttcacaagttgttctgccgttttttccaacgcttcttgctgcgctcccgcagtagcttctccagactgtatcgcatttccccctagtgcaactacaatttttcttcgtgccatattccagccctccagttgatttcgctttcacagcgctttataaagtaatactgcctgtaattaatccataaatcgcaaagaatgctaaagcaccaattgctacggatgatgctaattccactcgagtaaatatttgcttcgaactcttttgcttttgaacattgtaaaaaataaaaatacctggcgcatataaagtcattgttaataataaatactctaaaccagctgcataaactagccacacgccataaatactggctatcaagccaattattatatttttatttcgatctgcttcttcagactttaagctatgcttcagttgataaaacgctgaaaaagcatatgggattaaaatagctgaagatgctaaagagaatgcaaagttatacgcctgatcagaaacgacgaatgttaacaagaacatttgtattaaaccatttgttatccataatgaatttactggagccttatttttattttcttttgcaaaccattttggaaatactccatctttagccgctaaatatggaatttcagaagcgagcaaagtccaacctaaccaagcacctaatacagagatgaccaaacctaaattaataaaaatagcaccccattttccaacaacactttcaaataaataagccatagccggatttttcaaacctgcaatatctgcttgctgcataagtccaagagacaataatgtgattaaaatataaatgatgagtgtaccaattaagccaataacggttgctttccctacatcacttctattttttgctcgactggataaaacaacagccccttctaccccaataaatacccataaagttacaagcattgtacttttaacttggctgccaactgctccccatgaaaaagaaccagtttgcccccaaaatccatctaagaacgtatcaatatgaaacgcgaagattcctatgacaataaatacaaatacaggtactaattttgcgattgtagttactaaattcacaagtgctgctgattgaactccacgtaaaattaacatgtgaacacaccataataatacgcttgcaccaataatggacgctacattttgcccgccttcaaagattgggaagaaatatcctaatgaagaaaacaataatgtaccgtaagctacattcccaagccaagcagatagccagtatccccacgcactattaaatcccataaaattaccaaatcctgcttttgcatagctaaaaataccaccatctaaatctggccgttttacagttagattttgaaaagataatccaagtgcaatcatcccaattcctgttataacccagccaataataatggctccagcaccagcaccttttgccatatcactcgctaaattaaaggctccaccgccaatcatagacccaactacaagagccgttagtgtaaacaaccctaatttcttatcttcacccattccactcacctctcttaaattgcaataacaatacaaaagcaatagtgaatgatagtgtctaaaggaggagaaagaagaaaggaagactccctttcttctttactccatatttcctaaagtagctgccataaccgctttaattgtatgcattctattttcagcttgatcaaatacttttgaatgtttactgcggaatacttcgtcagttacctccatttctttcaacccatatttctcataaacttcttcgccatacatcgtttcaacatcatgaaatgcaggtaaacaatgtaagaaaatcacgttttcattccctgttgctttaatcattttcatatttacttgataaggtttcaataactcgacacgttcagcaaatttttcttcttcccccatagacacccatacatctgtataaattacatctgcattcgcaacagcttcttccacattacttgttatcattacctgttcattatatttttttgctaaatcaattacttcttgtgcaggccataaagattccggtgtacaaatacatacatccattccaacgattgctccaccaactagtaagctattagcaacattatttcgtccatcgccaacgtaaacgagcttcacatttttcaatttccctagatgttctctaattgttaataaatctgctagtgtttgtgttggatgccacatatctgttaatccattccaaaccggtacaccagaattttgtgctaaagattctacggtttcatgatgaaatccacgaaactcaattccgtcaaacatacgccctaacacttttgctgtatcctctacagattcttttttcccaagttgaatatcacctttccctaaatattcaggatttgcccctaaatctgtacatgctactgtaaatgcacaacgcgtacgagtagaagttttttcaaataaaagcgctacatttttaccttctaaataatgatgcggaataccatttttctttttctcttttaattctgctgccaaatctagaaaatataacaattcttcttgtgtaaaatctttttctgctagaaagcttcttccttttaaatttggtctagtcattaacataattcatccctactttctccgttatttatactaaatatctttacgaacaattggcatactcatgcaacgtggacccccacgaccacgagataattccgaacttagaacctcaatcacttctataccgtgttcccgtaataacgtattagatacatagttgcgatcatatgtaacaactacacctggcgcgattgctaatgtgttcgagccatcattccattgttcacgagcagaagcaattacatctcctcctccacatggaataagaactaattcacttaagcctaatacctcttttaatgcttccattaaagacgtacgatgtgtaattttaagagtttcctcatctgatcctttttctaaaatataaatattcatattcccttttggtccttgaatggctgggtgaattgtaaacttgtcatagtcaaccattgtaaatactgtatctaaatgcataaatgctcgacattttggaatttctattgctaacactttcttaattttattttgtcggctaaagagatttttagctaaacgttcaattgctttagctgaagtacgagcagatactccaatcgcaattgtttcttcatttaaaattagctcgtcgccaccttcaattggaaatttataatcacgatctaaccagattggtacattatgttttgcaaatcttggatgatatttaatgatgtactccatgaataatgattcacgtctacgcgctggttctctcatcttatttatcgttaagccatcgcccacgctagctgctggatcacgagtaaaatataaattaggcattggatctaagtaaaacggatagtgatcttccattaattcatataaatgtgtcttcttacttgtttcaatttcgtttttccgtacaccacccataattttttgaattaattcttcatttgaaaaggaaagtaaatattcttttaaagtttgatgtgcaacatttacgtcggcctgtccttcttttaaaatacgatcaacaaattcttctcgaagttttttatctactaacgcctcagcggctagtttttctaaataaagaacttcaacaccccgattgcgtaacgtttgtgcaaaataatcatgctctttttgaataattggtaagtatggaatatcgtcaaataataattgctgcaaataatctggcgtcaagttttccacttctttacccggtcgttttaataaaaccgtttgtaattccccaatttctgaagtaacatgtatcggatgtttcatttgttgtacctccttttaaatatgtttgatgtcttacaagtacataataaatgctctacactttcatctttgtgaaagtatccacattatcattgtgaaatattaaacaagttatttttttaaaatcatacgaatatgtatttttataacaaactatctcgctttctcaataaaaaatacatatattacgcatatatgttgaatatttaacttccgtatttaaacaaaaatcctgtttttaattttattaaaaacaggatttttgcatctaaataattaaatttaatctttcttctataatctccctatctgatttcgactgtgaaattataaggcatgtatcatttccgcatatacatcctattttttctttccaatctaactcatcaaataaaacaccaataacatgtgcattaccaggtaatgttttaataaccattaattgatctacacaatcaatttttacaaccacttctcgtaattttttctttaactttatatcagtttgtacatgctcttctgagaaaactttatatatcattaatccttcttgagaaggtaccttcgttaagtttaactcacgaatatcgcgagaaaccgtagcttgtgttactaatacatctttttttgctaacaattctactaatctttcttgcttatctatttcatactcctttacaaattgtttaattaaccgttgtcttttttcttttttcataaaagacaccccttttaatattatagctcgctataattttcatccgaaagggacagaaaagaatgttgcggaaacgttcatagtttaactgtaaatattaaatcaagctaaataaaaaagagaagaacagcattctgttcttccttttacattgaaaatcgttcaattgtttgtttcaagtcagttgcttgcttctctaaatcctttaataattgatcgattactatcatatttttagactgttgtagcgtcacacgcgccacttcttgcgaaccagctgacgtttcttcagcaattgctgctacagcttttgtttgtgctcctgtttgatgaatgtggctcacttgttcattcatataactactaatttgctgagttgcatcggctacttccataacacttgatgacatttcttttaaaattaattccgtagcttccccacgtttcgcctcttctttagctattttcacttgttctgtcattttcattgcaacttgttgtacttcatcttgcatattccgtaataactgcgatatgtttcttgcagaatgatcactttcatcagcaagtttccgtacttcttccgcaacaaccgcaaagcctcttccatgctctcctgcgcgagctgcctcaatagaagcatttagtgctaataaattcgtttggctagcaatcgcactcacaacagacacaatatgttctacttgtttcattcgttcttctaacttctgtacattttgcattgaatcttcattttcttttgccaatgtttgaataccttgaattaaagacgtaaagacacgagtactatgccctaaagcttcaaccatttctgaagacaatgtatcagactgcttcgctttttcttctacttcacttgcaatagaagtcgttgtatcaacagcagaaacaattgcttgaattgatgccgctgattgctcagcgcctgaagaaatttctgcaagtgtctcagatacaccttgcgcttgtctcgttgcttcgcctgtttgttttctaatctgctgtacttgattatttgtatacgaaaatgttgtatcaatattttttaccatgccccttaagtttcctaacatcatattaaatgcaacacttaaagatttaatttcatcatctgtcttcggtaatggaacatcttcacgaatatcaccctcagctgcttttcttgccgcctcctctaacttgcgaagcggtttaattaaaaatacggctgctccatatgctaaaattccagaccatactacccctaataacataacgataatattatatacagtttgacttacataactttgaaaataatcgtatatcacgtaaataaaaaagatacttgttgaatatgtaatgaaagctaaaactgtagtgaatagcataagttgtgtacgtaatccaaaagaaaatgttttcctttctttttccatcttccctttccccctttttataagcaatataaatactacctatatattattatccatattttcattatagaaggatatagagattttaaaaaaatattatttctttgaatatcaaattgcacgaaaaaaataaaggattctgacaatttatgactaataacagaaataaggggcaacatttgtaaaatatatttttaactgggggttttgtatgattcaagttcgaaatctagtaaaatcattcggttcacttgatgtgttaaaaggaattgatttagaagtaaaagaaaaagaagttgttgttttaattggtgccagtggttctggtaaaagtacattacttcgctgtcttaactttttagaaatgtacgatgaaggcgaaattcacttacaaggtgagcgaattgatccaaagcattcaaatttaaataaagtccgtgaaaatgtcggtatggtttttcagcactttaacctctttcctcatatgacctcactagaaaacatcatagaagcacctattcacgtaaaaaaattagagaaagcaaatgcaaaggatattggaactcaacttctccaaaaagtcggccttcaagataaagcagatgtaactcctcatcttctttcaggtggtcaaaaacagcgcattgccattgcacgagctcttgcaatgagccctaagattatgctatttgatgagcctacctcagctttagaccctgaacttgttggagaagtattgcaagttatgaaagaacttgctgaagaagggatgacaatggttattgttactcatgaaatgaattttgcaagagatgtagctgatcgcgtcatctttatggatgatggaaagattgtagaagatgctccgccagcacaattcttttcagctccatcacatgaacgggcaaaacaatttttacgcaacgttttataatgtaacttttgtttcgaacgaaaaacaatacattcatacggtgcacaactaatcatctaaataaaatatttcaataacatactaaaaaaccatccgtatgatcaatatataggaggggttttatgaaaagaaaactattaaccattgttgcgagcattacactatgtacatctttcatactaggagcttgtagcaaagaaagctctactacttcaacaaatggtgaaaaagaatttcgctatgcgatgagtggattatacaaaccttttaactataaagaaaatgacagcaaacttgtcggttttgatgtagaaatcggtgaagctcttgctaaaaagatgaacatgaaggctacgccagttacaaacccatgggaaacgctgattcaaggtcttcaagcgaagaaatatgatgtaatactgggtagtatggcaattacagaggagcgcttaaaagctgttagtttctcaaatccgtactatcgctctggcgcccaaatttttgtagctaaaaagaataacgctatctcttctccagaagatttaaaaggtaagaaaattggtgttgtaaaagctagtacctttaaaaatcttgttgcaaaatatacagatcaaatcacagaatatgacagcgatattactgctcttatggatttagagcctgggcgtgttgatgcagtaattacggatcaaatggttggtctacgtatgataaaagaaggaaaatcgaatataaaagaagccggaaaaccattaaatcttgatgaaatgggaattgctattcgcaaagatgataaagaaatggttgagaaagtaaataaagcgttagatgaaatcattaaagatggtacgtatgaaaaaatcagtaaaaaatggttcgggcgtaatattctcggtgaagaggaaaaaacgaagtaagttagccattcaaaagattcataaacagtgccccactgattaaatgttcattttatgtggggcatttcattctctactaaaatctatacaatatgaggtgaaacacatgtttgaaatttttatctctacctatcccacactcttaaaggctactattgtcacattacaattaacattaacctccctagtactcggttcattaattggattattatttgctttctttcgaatctcgaataacaaagttttaaatagcattgctcatatctatattgctattattcgtggtacacctttaatcgttcaaatcgcaattctctattttggcattacatctgtcattgttttctcccctttttgggcaggagcaatcgctttagcaattcataacggtgcatatattacggaaattttccgaggatccattcaatccgtcgaccggggacaattggaagccgctcgctccttaggtatgccttaccctttagctatgcgccggattatattaccacaagcatttcgtctgtctcttcctcctctaggaaaccaatttattatcggattaaaagactcttcactcgtcgcttacgtaggactgtccgaattatggggatcaggtttatcaattgcagcaggtaacttccaacaattagatacttacataatcgttggtgtatactatctcgtacttgttcttctatttacttattttgttaatcttttagaaaaacgactacaacgaaaagaaactaactccgtccaattccataaaaagaacaaaaaggaagtttctttataagaaaaagcaagcctgagatggcttgctttttcattgcaaaaatatattaatttttactgatttacttttttaatactcttttcttcctctatatgttcctcacgatatgaaatattatgaggatctagtccatttcctaaagaaccatagaaatgctctctatgcggatcaactaattcacttccttgataatacacgcgtggtgtattccatagcgctgccaaagcttttgtcatcggcatctcatgatagcgttccggccacatttctttaatcttctcttttactaacgggtagtatttagaactcatagcaggaaacagatgatgttctgtatgatatgagaaattgaagtgtaaaacgtctacccagcgcggcactgttactgacaaacagtttgctaacggatcatttactggaacaattggatttaagcggtgatttgttgcgatatatgccattacaataaagttagcaattaacaacggaatgacatatgcaaataaccattttccaggtcccataataaacaataaactaatccaaactgtccaaggcaaaagaagttgaagccatacagatttttgattggatgacttgaactcttttataaaatgaaagaacattcgagtcgaatgcaatgtaaattgaattgttagtgacagaaaactaaagaatgaacgtacatgtaaaggcatacgatatacccaactcaaaaacttactcttcttaagtttctcaagtgtcggccatgcatccggatcattctcttcatgctgtgtatgaacatgatgcgttgcattatgccactttctccaaagctttggccctgttgataatggcataaatgcaatcgcgcctaagaagtcacgaagccatgcctttcttacaacagttccatgtaaaatttcatgccctaaaaatccaagtgaagcaaaacataatccaagaacaatcgcaattcctagattcgcccacacattcaattcaaatacaccaatcgatattaaccccgccaatgccacaagcaaataagccagtccaccaaataaacgagtaggcactggtttaaatgcttttttcggcaaatgtggtgatacacgtgctgcataccacccaaacgtatgaagctccttcatccttttgctcctttcttatgccgcgccttgcgcaacttacatatatcaattcttgcttccagattgattttactagatgatccaaaaagcatctattataaggaaaatatactcactctatcgtcacttatttttcgcttttattatcaatgaaaaacatttctctttttactctctatcaacctttccacatgatgaatcataacaatagaatttctatattgtcaacaccttttatgacctagtaataaaaggtggttatatttttataatcatactttatttcactaaagaaaatgtatagattccataaggatttacccactatatatagacattttcttaaacgtcatagactctatctcattcaataactccctatgtaatcaacaaacagaatcacttgaatttagttttatataaatcctaccacttcataatgccccatctaattaattatattaaaataatttataacctcttttaataaaaatagactacttctaaaacaacacacatgaatttcatatattatggaaatattaaaaggaaaattgttctaaaatcaggaggtttccgcaatgacaagtgatacatttccacaactgccgctatcttattggattgaatctactcagtttcctactttccctcgtttatccgaaaatataaagacgaaagttgctattatcggtgctggtattacaggtattactactgcctatttacttgcaaaagaaggcatcgatgttgttttaattgattctggtcgtattttaaacggaacgactgggcatacaacagcgaaagtaacagcacaacatgatcttatttatgatgaattaataaaccatttcggtgtagaaaaggccgggctttactatgaatcaaataatcaggctctacaattcataaatgaaactgttcaaacatataaaatcgactgtaatttctcaaatgaagattcatatttatatacaactaccgataacggattaagaaatttatcgaaagaatatgaagcttatcaaaaattaaatataccttgtgactatgttcaatctctatcgattcctattccagtacaatctgcgcttataatgaaaaatcaagcacaattccatccccttctttatttaaaaacacttttagaaaagtttgtggagatgggcggaaagctctacgaacaaacaacagctatggatgtggaaaagggagatcatccacaaataattacaaaagagggccatcatacatgcccatcaacttaagaatttgcactacccccaagtgtcaaaaaacgttattctttctaaaaagctagctagaaatgtaagtccggttcggggaggaacatttggaaacctatcacaggaatgtaataaggcgctggatgtttactctacacatatgccacaaaggtaaatgaaaaaacaaaacttattgaaaaacttcttcgaaatgtacatagttcttctaaataagttgcagaatgaaatataatgatacccagttattaataatagtatctaagaaaaaaactacttcctttcttaattcatatgatttttaaaaataaatcctatagatgttaatatttgttatataatatatttgtcaaagcattacccctaaaatttctacagtcaatctgtaagatagtttgtttggcccgtatattcaccttaaactaaaaagaacttgtagagattcctacaagttctttttagtttaaggattaaatgaggatttaaaatatagttgcaattttttgagggggaaaagtaaatgtttataaaaacagaaagattattaatacgaaaatttgagttcaaagattggcaagctgttcatgagtatacatcagatatcaatgttatgaaatacatacctgaaggtttttttactgaagaagatacaaaaaactttgtaaatgaaaatattggtgaaaacgctaagaactttcctgtagtattaattgataaagatattttgattggtcatatagtttttcataaatactttggtgagcatacttatgagattggttgggtgttcaaccctgaatatttcaataaaggatatgcttctgaagcagcacaagctacattggaatatgggtttaaggaattgaagttacatagaattatagctacatgtcagccacagaatataccatcatatcgagtgatggagaagattggaatgagaagagaaggctatttcaggaagtgtataccacatgggaatgaatggtgggacgaatattattacgctattttagaagaggagtaaagcctcataacgcattattaaaagaaaatgttcctcctgaagttgtaaaagcggtagctagaatatgaatggaaacaatttgatggaaacggtcagccaatcatagcgtaagacgatggaattggcattatgtaaattactattgttgttgatattgtcttaattgaaaaaataagttctgttattacttgacaagttcaaaaatagtagatatgctttaacacgaaacgaacaaaaaatttgagatatctatgacctgttaggtgaggctcctatacaaacacaggctattgcccaaaaatatcgaaagatgccaatgggtagaacaggaattgtcggattaaggctcttcttaagatagctaagtgatgaatgattcatcctttacgttgtatagtgccaaaactcaactagggggaatgagctttatttagctatgtcttttttagcaacctcctttagttgaattactaagggaggttttttatatgcaaaattttatttgtaataaatcttttataaaaggggggaagactaatgattgatgatattgatcccatatttatgaagaaattagttttcctagaagtgggaaaatgataccaagtaccactgtccttaaggaggaattacgatgaaagaatgcttacaacaattattagcaacaaaagatacacacttagtgcaagagcttataaaaattcaatcctacgatattgcaatggaaataaaaggttttcaacataaagatcagatatctttaataaaatgttttcctactgaaaaaggtgcgaaaattctcagttatcttacaccagaggagcaatataatatttgtaccaatttgcctgtggatagaggagaagagctattagctaggcaatctattgatgaccttgttgatgtaattctttcaattcatccacttcaggctgaaaaacttatacaacttttgtctgaagaatctcaacaaagaattagaagtctgctggtttttcaatctggaacagcgggcagtttgatgacaattgactatattgctgccagggaaaattggaaagtgaaagatacgctgtcgcatattagaaaaattggggcaggggttgaatcaatttcgtatatttatgttctggatacacgtggtcagcttaatggaattgtttctattcgtgaattattgctagcttcagatgataaaactttatcatcgataatggcatcagatgttatttcagtttcagtgaacctagaccaacaggaagccgtacaaaaactaatggattatgatttatccgctatacctgtaacaacgatggataatcggatgataggtattataaccttcgatgatgcaatggatgttttcgaagaagaagcaactgaagatattcaaaaattaggagggagcaccccattagataagccatatttcgaaacttctatttggcaaatataccgtaaacgtataggttggttattacttctgtttgtagcagaagcatatactggttctgtacttcggcattatgaagaaacattaactcatgtagttgcactggctttctttattccgttgttaattggaactggtggaaatacaggtacacaggtcgtaactacattggttcgagctgtagctctaaatgaggtgaaatttaaagatatatttcgtgttatgaaaaaagaagcattagtaggccttttactagggcttacattagccgtggcagcattaattcgtgcgtacactttaggcgtaggtacagaagtcgcgcaagttgtagctattactggattgttcattgttatttggtcgtccattgtttcatctgtattacccttgattttaaataagttaaagctggatccagctgttatctcaggtccgttcattacgacattagtcgatggaacggggttaattctgtactttaccattgcaaaaatgttactagggttataagaaacttatattaagttttttttatacctaagttcgttcccgcaaagtttgtagacaaactcgttggaagtatagagaaagagagaatagaaatgaaaaaagtattcaagttactggaatatccgttggtgttttcgcttatcattacaattgtatttggaattttgattatgtatagtgctagctcaattgttgcagttgaaaattatggctatagtagttttttgttgctaataagagggaacttataaataaaaattactatttatggtgagaataatactatttaagtgctattgaacttctgaatttaattgaaaattcagagtaattataaaaatgtagttttataattatttttttaaaacaggggaattctatttatttggataggaggtaaatttgttgagatctaataaaaaatatttttataaacaggaagtattaagcaaaaattataatatgctaattgaaattgcaaaaagtgatgttaaatcaacgttagatttttttaaaacaacgtctcaagggctgtctcacgaggaagctactaagaggcttgaagtgtatggagaaaataaagtagtttctcaaaaaagaataaaatggtatataacattatttaattcttttagaagtccgtttatttctcttctaattatattaggaatgttatctttttttaccaatgatataaaaggtactattattgtgggaatcatggtgacgttaagcgtattaattcggttcatacaagaaattcgttctcagaagtctatagaaagattaaaaaatcttgtatatgaaaaggtaactgttctcaggaagggaaatattccttataaagaaaataagagaactttattggaggaaagtggaaagttacaaattggtcttgaggatcttgtaccaggggatattatagaattatctgctggaaatattgtgcctgcagatgtacggattatctcatcagaaaatttacttgtaaatcaatcatctctaacaggagaagcattacccgttgaaaaatcaaatcagtatttccatatgtacaaaaaacgtaaaattagaaaaatccaaaatttaattgaattagaaaatctctgttttatgggaactcatattataagtggtacagcaaaagtaatagttgtaggtactggaacagatacttactttggttcaatagcaaagaatcaggttaagatgaacaagaaatctgattctaaattcgataaaggggtaagcaaagttagttggctattaattaaatttatgatcatcatgactcctattgtcatgataatccatgggggtattaatggaaattggtatgaggcttttttatttgcaattgctatagcaattggactcactccagaaatgcttccaatgattgtaacagctaatttagctaaaggctctattaatatgagtaaaaaaaaggtacttgtaaaacaactatcttctattcataaccttggagctattgatattctctgtaccgacaaaacaggcacgttgacagaaaataagatggatctggtacgccatacagatacaaatggagagaagtcggatgaggttttaagattagcgtatataaatagttacttccatacaaataataaaaatgaaattgatttatcagttatacgttatgtaaaagatagtagtaaatatgatttgtctcaatactccaaaatagatgaatgtctatttgattttgatagaagaagagtttcagttgttatagaaaaaaatgctaacgaacgaataatgctttgtaaaggtgcagttagagaagttgtatcaatttgtagttttataaaagaaaataataagataattcctattacagatgaaatccagcgtagaaataaacacctaattgaactctggcaagagcaggggatgcgagttgttgcagttgcatataaacaattaaatagtgataaagtgggaagttattctataaatgatgaatcagatatgatactcgttggatatgtaggttttttaaatccacccaaacaatcggctatcgctgcacttcatactctacaaaagaaaggagtacaagtgaaaattttaacaggtgataacgagtccgtgacaagaaatgtatgtaggaaaatgggcttgtatataggagaaccagtactgggttatgaaattgatagtcttcctgataaggtattaggaaaacttgcaagtaaaacaagtgtgtttgcaaaattaaatcctagtcaaaaattccgtattataaaggcacttcaaatgaatggtcatacagtcgggtttataggggatggaattaacgatgtgtttgccttaaaacagtctgacgttggtgtatctatccatacagcagatgatattgttaaagagagttcagatattatacttatagaaaaagacttacatgttttagaagatgctatagtggaaggacggacaacgtttggaaatatactgaagtatattaagatgacagcaagttcaaattttggaaatgtattaagtttattaattgctagtgcatttcttccttttcttccaatgctaccaattcaaatattatgtcaaaacttactatataatctatcccaactttcaattccgtgggataaagtagacaatgaatttttaataaaaccaagaagttgggatacaaaagatttatttcgttttattatttttattgggccggtaagtagtgtttttgatataatcatttttatcgtaatgtggaatgtatttggtgcaaatattcctgagatgcaatccttatttcaaacgggttggttcgtagtagggttattaacacaattattaattgtgcatatgattcgtactcaacatatccctttcctacaaagtacggctgctaggccagttttgatgcttacaggcttggttatgtttatagggatttcccttccatttaccagtttaagtactcaaattggtttaaccccacttccattttattattttctgtggttattgggaattttaacaatgtatgctttagttactcaatttataaagagaatatacataaggaagtttaatcgatggctataatactaaaaaattcagtccagaacaagaattactaaatactatattctaaatggataaggaatttacagcataatttagtttggtaggaaaaaaattaagtcagattgatgttttaatcaaactttattctcattctataatagagtaaaataaaaaatttagtacaatatggaataggcaacgataaaaactaaaggacaacaaaagagatatgcttgttgtcctttggtttttatttttaaatatgttttataaagagatatgtattagatctcttttttaattagagcatgaattaagaagatgtcttatttgttctataaaataatgatgatgtttgatactcgactagtataatagctacttccatagaagaaaggaaagaagcgagtgacataacctctatatcatctttagctagggagaaagaagcatgttattaaatattaggggtacgagaaggtaaggaatccaagggaatgtagaatataaaaaggagtcgttattcgactcctttttatatgggatagcttaattattggaaatattacctattgaaatactttttcaattgtaggcataacagctattggtggtagggatttagtccatgcagctgcatatacatttaatttctcacctaatgtgtagttttcatcatctgaaacaggaactcttaaaatcttattttgagaaactagatcccaccaatcatgttgataagcaagagcttcatcttttgtaggcgtagctgcaactactaaataattgttctctactgaaatgacatatccagtaaaaggttcttgttcttggttctgaatagtatgaacaggaatattattggcggaaatcttgttagaatctgcaaaggccggtgttaatccgaatgtaagtccacatcctagtgttaaagttgttaccgttgttacgaatgtttgttttttgttaaacatggtatatcctccttatattttattcttacactatccactttcaatttacatacatataaaaccttttaatattaagatgcttaacaattctgtcacaattatcctataaatgttaatattatctattaatggaattggatttgtgttataattcactaggtgaactattattgttcatttcatctcttgatgaatgtatgcccttccttaagtataaagatgttcgattgtattggtgaagagaggatatatccctcttcttttttattaatatgagatttttagggaatgaacagaaaaagaaccctatggggttctttttctaggcatattaacagtaaggagagtattgaaatactattttcaaatatttacaaggagaaaaatttgaaaaagcttatcatgtcattgtttttacatacatgtaatataaagttaattgataatatttaaactcattattactaatattcaattaagatagttagcactacattgatagtgttaattagcttgattggtgtggaatgtgatatgaagcataagtttgccgcaaacttgtgctttcaggatttgaagaatattcttaatatgaattttaaagaaaatataaaattttactagacgtgagaaaaaagaattgaaaatatcctttaaaataagatatattttgttcaaaaaattagaggacaccaattaattaaagcggtaaaaaacgttttaattaatcggtgtcctttttgttttaaaaagagaatatattttctcaacaggacaaatggtaattagctataagtattaattataaggataactggaaaatagaaattaataataaatgagaatgcaaaatgataacattaatatctgaaagaaatctatctgaaatccacgaagacgatgtagatgtattaaaagtaatggcacatcctgttcgattacaaattgtaaatgaattaatgcaccataaagtatgcaatgttacacagttaacggaaatattaagactcccccaatccactgtttcacaacatttatcaaaattgaggggaaccgtacttcaatcagaaagaagaggattagagatgcattattatatagataatgctaaggcacgtcagattgttgaaattttagatttgtaggttaataatacataaaaggtttcctgttacaaggcaagaaaccttttttatatgtataactaattgtgtgataatatcatactgtagaaactacctaacaataattaaatttaacagcttattttatcttgccacacacaatttaacacgatatataggtataaacgtacaaagaagggttttaaatagaaattagatataacaatggataatggtaagtgtattaaagaaattacagaattaatgaaataaaaaataataaatagttgttgtaaaggcttattctgataataaaaggaattagatacattaaattcaactatgagttttttactaaaaatatgtaggtgaagagtataagtaacataatccttttgttgctgatggacgaaaagccttcatggatttctttaaggaggattttgttaaaaaccctaattcctctgcagagattaaacgtgtagtagctgaaggggatacagttgctcttcatgtacattgtcgtactaattctcaagataagggagttgctatagtcggtatatttcgtaacaaggatggaaagattgtcgagcactgggatgtaattcaagagattccaagtgaagcagctaataataatactatgttttaagtagaaaatatagtggataattgttaatttgttagggatgtataaggtctagaaattaagattatttataataaaatgaaagagatgccctaggtatggtactagggcatctctttttgttttaataaggttaaatttattagtattcttaaagtgcctattgcatgtacttttttataacgtaatactaatttagtattagactactgtattagtttgaatgaagagggtaatttgctaaatacactatgttgttcatttccttcttggttcatacctgcttgataagaagaaaatcctttatacatttttcttttccattgccataagccattagtttgatcgaattcaccatagtaatgattgtaatcgagtttgtttccagtgtttttattaaaattattgctaataaaaatacgactattacttgcatagatttcgttattggtaatcacattgttacgaagatcgtaatttaattcaatttgaccactctcttgatcttttgtgtcatttttataaatcaaattgttggtaatcgtgttattttcagcgtatccttgctgactgtcatatccaccaattgcaatgccacccatagtattgttagatattgtattatctctaactgtaatttgacttgcacttttccccgcatgttcgctagctacttcaataccgaggtcgttttcatagctctgattttgctcaataataatttccttcccaccatccacgtaaataccatcagctgaatattcgttataactagtattattgaaagatgaattgtgatggacgatattgttacgaacaattccattccgtgcttgatctaaagcagctactggagatactccttcatgtccaatcagaacaattccgatgttgttgttatcatgcaccttgttattggtaactccaaaagaatcaacattcccattcacagcaattgcttcacttagtcctaatttcaaatttgctacttcgttattatcgatgacaatatgatttaaattattttgtgcactagatgaagtaccatagacagcaataccgtgtgcgtttccattctttacattcgtttcaatgtgatggatataattatttctaatctcgatattactccctgttccggtaatataaataccaataggggtttcgctaactttcgttgattttaaattgcgaaattctaacccgtttacctgaatataatttttatcttctatggtaaataatccatcatcctctaacttgactttagagccatctagaattaccttttcattctggtaattttgaaaagtaatcggtgcttctgagattcctgaatgagttacatgtactttttggttataaactccgcttcttatgtagattgtgcttccttctgtggcgacgtcagcagctttttgaatggtagcgaaaggttgatctaatgtgccagtgttgaggtcacttcctgccggagatacatagtaatctgttccagatgtaacattgttattggattgtgcaaaagttggtgctggaagtgcaagaattaatataatgaaagagagtattaagataaaacaggatttttttaacgatgaaaatattgtttgatatttcattattattttcctccttttttatgccattccttctcaactatatagttaaaactgacgatttatatcttgtttcagtaaaaaagtttaacttgattaggacaaaatcaatcacgttccagaatcgataaaatctattataaatatatatcgtatatattaaaaagaaataaagataaaacttttataggttatcaaaaataggaaatagacttaccctcaaaagggaagatttaatgttagagcgtagaaaatcataaatattagaaaaaatatccgtagattcaaggattattagactttcaattctacaaaaaagcagaaagaaaattatatgtttctacatgaaaatggaattctaatttgtttaaaagtaatagagcttgaaaaaataatataagtagaagatttgaatgaataattttaagaataagtgtgatatgaatcataagttttccggaccggcaaacttatggttgtttttgttttggacaaactgttacttctaggttttgaaaaaaatttttaatgtcgctttttaaataaagtcacattgcttacaaaagaggtgtaatgttttaaaaaaattgcgatgttttgttccttggaacctttttatcaaaagggatgtttttatagtgaaaagaagatctgaactaaaaggccgattaaggaaatgttaagtagcaataaagttatttcatttttagaatcagttccttctttctgagaaaaagcttcttcactatattatctagattaatttggttgtattctccagttcgaacaaactataaaaaacatcatcttttctagttaaattttagaaataaaaacttttttacacttggaggagtaaaaaaacttaaattgataggaatgtatagtgactaccttgtatgttattgaaggagagtatatgagtatgcaattgtacatattcatataaagtacataatacataaaatcccataaagttatagtgaaaacatttttttgcatgatatttattaagaattaatgataccaacaaattttatgtttaattatagtagtaaaattatttcacttcatgaagtgataatagtatggaaatttttttaatataattagaaaaaaacaaaatatttaatgtcggaaaaatcaaacataagatatgcgattttctagtttacttatgaaaagcatagtgattaaaatgggggggaagtaaggaccttatattctatcaaaaataaataaaaaacgagatgcaattactctttcaaaaaaacttctatccgcaagtgtgtgtgaagaaatcctaacgttaggttgtacaacatttacgactaaaacttgtaaaaaacaatagtgaagaggtgtaaggaatgaagaataaaattatgacaggatttttaataacatcaattgttaccggggcgacttttcctatcaatactctagcaacgccaatcgttcaggcagaaacaaaacaagataatgtagatatttcctcagcattacgaaaaataggtgcacactccaagttaacacaaacctttatcgatggagctttagcaagtccgaacgtacaatttgaagaaattccatctttaaatacaactcaatttctaattaaacaagatatgaaagagtggtcatccgaactttaccctaaattaattctattaaattcaaaaagtaaaggatttataactaaatttaatagttattatccaacattaaaaggatttgtagataataaggaagataaagaagggtttacagatagactggaagttcttcaagacatgactataacaaatcaagaaagtgtgcaacgtcaaattaatgagttaacagatttaaaattactggtagataagaagttgaaaaaccttgatactgatgtggtaaaagcacaaagtgtccttaattcagagggaacaggaaaaatagataagttaaaaaatgaaatgctagatacaaaaaaatctattcaaaatgatttgcagcaaatagcattattaccaggcgcgttaaatgaacaagggctaaaggtattccaagaaatttatagtctatcgaaagatatcattgaaccggctgctcaaacagcagtagtagcgtataacaaaggaaaagaaataaacaatgccattgtagacgcagagaagaaagcagagcaagaagcaaaagaaaagggaaaatcagctatagaaattgaagctgccaaaaaagaagcacgtgaaacgatagagaaaagtaaaaaaggtgaaatcgctgcagctgcagttacaaaaacgaaagagtatgatcttatgaaagtgattgatcctgaaaaaataaaaaaaacatataatacttttgctgaaattaataaactaacagctgagcaaagagcatatttaaatgatttagagaaacaaaatcagaaattatatgacttaacaactaaattaacagtagcagatttacaaaaatcaatgattcttttcatgcaaaatgacttgcatacatttactaatcaagtagatggagaaattgagttaatgaaacgttacaaagaggatttggatctaataaataatagtattacaaaattatcgactgaagttgataccaataatactcaggctcaaaaagatatattaagacgattaaaaagtgtaacaattcaacttgaagaacaagtttataaattttgatattaagaaattaggtttattaaaaaattataacgaaacggaaaataaggaggagaatcaaatgatgaaatttccatttaaagttataaccttagctactttagcaacgattataaccgctacaaatggtagtactattcatgcacttgcacaagaacagacagctcaagaacagaaaatagaaaattatgcgttaggacctgaaggattaaagaaagcgttggctgaaacaggctctcatattcttgtaatggatttgtacgcaaaaactatgattaagcaaccgaatgtaaatttatccaacattgatttaggttcgggtggagaagaattaatcaaaaatattcacctgaatcaagaactgtcacgaatcaatgcaaattactggttagatacagcgaagccaaacattcaaaaaacagcacgtaatattgtaaattatgatgagcaatttcaaaattattacgacacattagtagatactgtaaaaaagaaggataaggtgagcctcaaagaaggaataggggatttaatctatacaattcatacaaattcaaatgaagttacggaagtcattaagatgttagaggctttcaaaacaaagttgtatacaaatactgtagattttaaaaataatgttggtggtccagatggacagggaggattgacggctatattagcgggaaaacaagcgctagtcccacaacttcaggccgaaattgagaatttacgttctacacagaaaacacattttgataatgtattagcctggtcaattggtggtggattaggagcagctattttagttattggaacgattgcaggagcggtagtaattgttgtgactggtggtacagctacgccagctgttgttggtggtcttacagctctaggagccgctggtatcggtttaggaacagcagctggcgtcgaggcatctaatcatatgaattcttataatgaaatttcgaataaaatcggagaattaagtatgaaagctgatttggctaatcaagcggttatttcacttactaatacgaaagacactctaacatatttgtatcagacagtggatcaagcatgtaagtccggttcggggaggaacatttggaaacctatcacaggaatgtaataaggcgctggatgtttactctacacatatgtttccaaagttttaaaatattacaaagatttaggttgtgtggcagatgtatctggagaatggatttctgataaaggttggaaatggccaacgaaatcaggtcgtattacagatacgtttgatgcagtgcgtggtggaaagcaacataatgcagttgatattggggccatgaccgccggaaaagctggagaccctgtatggtcaatggaagtaggtattgtaacagcccaaacaggaaatgtaaatggtggtggtctaggtgtctatgtagatcatggaaatggtattgtatctcgttacttacatttgagtaaaatatcagttgcaccgggaactatggtgacaaaagggcaaattattggggaaatgggcggttctaactttgatagagatacaggtttccttaatatgaatggatacgctgtccatttagatttccaaattcgtattaatgaccaaccaacagatccaatgaaattctttaagaaaaatgatgatccagggttatcatctggtggttctcctacaatgacaaatgctaaacgacaaaaggtactggaagaagcgaaaaaatggattgggcaagggaaagtgagctatgtatccggtgctagaaatccagctgcaggtagtgctgattgttcaggatttacacaatacgtgtttaaaaccagtataggtgtccaactaggggattggacaggtgctcaaattggacagggaaaacaggtgcccgatatcggtcgtgcacagccaggagacttaattttctatgaaaatccgaaccatgtatctatttatttagggaatcagaaaatgattcatattggtgataataaaggtgtacaaattacaggtctaaactatacggcaagaggacaacatatgacgcaagtccgtaatgtaatcgactgatatgggatgtgatgatatgaagaaagtcatgaatatgttagcgaatctgcctcgtaagtacttagttatattggtaattatagtgttagtagtaggcgttgcgacctataatacgattcatcgttatatgatgaaatcacaagtacaagaggaagagcaggtaaatcaagatgaaatcgagatgcttggtgataagccaaagggatttgatacaaaagaggaagaatatatcgcaaagacaaaaacagtagaggatttactacgaaaaatttctaatagtagttatgatgtcccgtatttgtttacaaaggctggatttggtattgaaccaatgaagatgacaagtaatgagcgtatgctggctacagaagctgttcaaaggtatttcctaaatggagatcaattttacaatgcgcgtattaccaaaattgatcgtggaaaaaaagtagatacgtttcatattgaagttttaattcaacaggtaaacttcttagaaccacgacaatttaaagtgcaggtaaacaaatatgcacaaattgtaacaccaattgcacaaattccacatggacaagaagaagtacctgtggattaagaagaaagtgagggttgtggagaaaaacacaacccttttataaaaaaataaagagtacctaaaaacatttattgaatattcataattttctgatataataaaaccatggttaaaagaaatttgtatataacgttaaatgaaatggatatggaggaatacaaatgagaatgttaattggaacagctgcgaattttgtttcggggtattatataggacgaaattctggattattaggaacgttgcttggatgggcttttttgttgggtggtggctatctgttaatagaaaattgggatagtatcacagtatggatgcatagtttaaatattgtaaaagggctagatggttacgaagatatgagcaatggcttcattttcatctgtttggtggtaagtggctttatttttatcttgttgtccccgattttcattattttattaatagtttgttttgtgttaatgaatattgttgcttgtacacttgtgttattaacatcaccaagtacatacataaagaagaaagataaggagagtgagtgggaatgagtacaattctagttttaggtggatcaaatggaagaacgttagagaagttggccaaaaaaagagactgccaggttattttccatgatgggaaaaatcacggaggcgtaaagaaaacgtttcgaagtgttataaaaaaatgcgatgttattgtcattcaaaaaggtgcatgtggccatgtatctattgatgtagcaaaagagtacgcaaagaagtatgatgtcccactattatttaatcagggatttggtggaacaggtgcattagaaatgggtttaaagcatctgcaagcggcttgattttagtagatagtctgagataactgtatgggcacctaattatataattattatatataatttttagtgttcatttgtaattacttaatgtaataaaatatgaattttgtagagaagtaggtgggtttatgaaagaaaagattgattcaattaaaaataaactctctaatggaaaatctcgttttgagaatggtaagaccgtggtagaggttagtttatctgaattaaatgaattactgagcttggcttatgacattaataattatcgtttaaatgctttgtggaatttagagcaaacatcaaaggcatataaagagtacaaaatacgtaacgaaaaataccaagaatcgttaaaactaataaaaggaataacaaatggagtagataatgcaattgttaaagatgtgaatcgaatagcaaaagaatcattatcataattaaccaaagcgttgtttgaaaataaaggagctggggaaatggacgaaaagaaattggaattgaatgaggatcaaaaatctgtattactgaaggtgttaaaggatatgcactttgctaatgctcaattacgtgaatgggtgagtaaagatttactttcaatcgaaatgtcaaaaacacttccatcattgatagaaagctattttagtgaagcagcaaaagtactaaattacgaatcatatctgttggaagaaaaagaaaaacgttatgcggagattaaaaaggcgaatcaaaagatacatgaattacagggtaaattaggttccgataaaccagttgatggtttaaaagaacagttgaaacatctttctgaagttgttagtgaatggtggaatacagaaggttttaatcatgtgcatgatacgaagtattacccctatggtggaatgagagtgaaacttagctttatgttagaacattgtcgttctttcagtaaaactcctgtaacagataaaaggagccgagaggaacacattcaatatttacgtgaaatgggatttgaatttgccgactttgaaaaaggacggagtgaaaaattggatttaatcgacaatcatcaaaatcgttcattacttataaagatgcttacagagcgttttccttctcttgatgtttatagctttagcaaccatagtagttactctaaaaaagacatttttattattaagcatatagatgcttcaatttatgatttatctgatatttaaaatcgatgaaataaaacaaaataattatttaagggaaaaggggaatatatatggatgatactctagatcttttacaggattcaattgagttactaataaatcttagagattggatgtacgtcgtaccaaaagccaatttaagaggattcagtattgataaagaatattggtttaactatgaagatttcaagatgtttagaacaccagaggatgtaggtatagctgttaaaagtgacacgggagaatttgaactttttagctacagtgaatttttatcattcttcgatcgtaaataaaaaggaagttagcaaaaagctgactgcaagaactaaacaaaatttttatttgagaggggaatgaaatcgtgaaatatgataaacaaaaatgcccaaaatgcagcaagccagttaaaactttatatagaccatcaatgaatcataagggtcccaatctttgctactggtgtaatcgaaaacgtgttaaaaaagaaaatgaaatggctttacaaaaataacatgaaaattttataaaaaagacgaacgaaaaacatcactggatccaatgaaagttcgttattaaaaacaaaatcgttaattaaataaaaaagtgaaaggcgaatacattaacatgaataatagtaatatacataaatcaggttatatcatactcatttattttgtaatgactcaatttgttgggattataggtgtacaattgctagcgaagacgggctggtatgatattcagggaaaccaacagcaagcaattcaacaacttcttgtgcattgggaactaattgggttttcacttatgctgataatcatttttcttatatatagtaaagaaataataaatgatccaaagttttcgattaaattatcaagaaattcattcatatggactttagttgggatcatattcgtatttcttgcgcagatggttggtagcgtgttagataagggtgtattccagctaactacgcaatcagcaaatacgtctagtacagtcgctgcagcagcaatatctcctgtggcacttgtttcaattgttcttcttgcacctttagtagaagagtttgtttttcgttatgcggccataaacattttaatgtctaagtttaagaaaacttggagcatactaataagcgcattgttcttttctatcatgcattttgattttccatttatatttgggtattttttaattggagttatactagctgtagtatatatgcgtactaataggttactagtatcatttgttgttcatgctagtatgaacttaattgttgttatactccagatttcttgatgaaaaagcagcggattcacgtaacttactagtgatttagtttttttgtttaagaattttaaaattatggtaagattaataagactacatttgaaaatgtgggttcaagttgctgtattgactgaattgcacaccaaaaaaaccaattccattacacgggaattggtttttttggtgtgtgttttgttagcataatgtttgacggcctaaaggagagttgttcctttgtagtttagtataacttaaataaaaagaaaatttaaaacaaaatattgaatctttacatattttaaaattacaacacaaaaatgtaaagatatggtttataataagtggtgaaacactctcctatgtttctagtgattgtattttttatctgtttttggtgcgaaatctgttgatagattttgcacttttttatttaatgtttaataggatcagaatgatatagtgcccctatttcttgtaaactccttttctccatacccactcaataggaccataacggaaatatttactccaaatcttgctgaatataatttgtacaaaaataattaaaagcccaaagatacataattgccagtaatatacgtgtgagacatctttaaagcaccacgaaagaatgacaagcgtaagtatgctttgagtgatgtaattcgttaaagcatactggccaacgttcataaaggggtgcaggcattctatatattttttattctcacaaactctcagtagagtacaaatatagaatatagctagcattttccctccaaatagaatccatagttgtacatcctgagagtaatagacatctgtttttataaagtagtagataataggataagagagaaggcatgagatacataacgaactccactgtaaaaatctaattttctttattaattccggtacccttttaaaaatatttttcttaccagcccataaccctattaaaaataagcctatatattccggaattcctattagtagttgctggaattcctgagtcattagaaagaaaagacgtgcttttatttgatgagaataatgtataaatagatttacagtgtgattggtagtgttacctgtaaacatatattgatagtaattgggcacttctgaaatagaagaacttgctcgcaaaaatacaatgatatgtaatacataactaaccattaggaaactgcaaccagctataaaaataagcctagtagatcgcttatagaagaacaatagaataaatccagctaaggcatacgcatgtagaatatctccataccatagaaaggtgaattggagtaaaccgaagagtagtaagatacatagtcttcggataaatagcctatacatgggatatccttttgcttctgtatttttcataaaaatgtaaaatcctactccaaataagaatgcgaaaatagtatagaactttgcctgtataaacaaatctactaaaaaacgaatcactttatctgtaccgatataacccgcttgattaaagggatctagtcccgtcatagtgggtagattcgcaaataggatacatagtatggctatacctcttattatgtctaacgaatgaatacgggcgttttgttgcatgtcaattctcctttcttaaacagaaaaaacgagcactatactagctagcgctcgaattacgtcttgcaaagaatccatcataggtagcagctgacactgctccttctagacgttcaatttcttcacctctgttataagctacaacaactggagtacctggaatgtcgaactcttgaaaggcactttgattttctggtgtagagatatcaatacgataaatggttctatcatgcttttttgacatacgattgatatccggtgcagcttttttacaaaaatgacaggttggttgatagtaatacgcaatgaactcttcatgggattgtatttttccctttaattcttcttttgaaatatcttttatattctcaggtgatccttttacatctgcagcagatacaattgttttttctggtgttatagtttctgtattgactgattcattcttagttaaagtaaagatcgcaatacaagcaacacataaagtagtaacaattgctccaattttgtagatttttttcatagtaaattcctccttaaagtaaaaaaaaaggacaaacctcgcccgagttaacagggcgtaaggtttgtccttcacgctacgtacaatagagtataaacaatggaaacaaattttctatctctataataccacaaaattcatatagaatgctataggaattttataagtaaaacaaaggaataacttaattgtaaaatttcatgtaccagattaaatattaaaaacaataaacagcacaataaggggattctctgtggtgtatccaactgatagggacactatcctcctccaataagcataaaatcattcaacaaacacatctcaaaaagtgtgtgtacttatgaagtgtgtcttaagtacattttgataccttttgaagtagtttaagctgcaaagaatatactatatctaaaggtgtaccttttgggagagtgtaattgactttgtgctacgattgttttaaaaataggttgcggaattaattgtaggatacaaggcggcgaaataacattaaggattttatagttaaaattatcaaaaaaatcaataaaatcatagtttacaattttatcctttagttggtatcatttacttattaaggggggagtacatgggtttaaacatgtatttgggagaagtacaagctcaaacagaaagtatgaatgctttttgtgtagccactattcaaggtatggaacaagttattaattcaattgatgcttttgtgggcgatactattttgcaagggaaaacttatgatacagggaagacattctttgcacagacatttcatcctttagctcaaggaattatttatttgtgtgaagaattaattcgacagaataattcctttccgaacgattttcaatcacaagtcgctacaacagatgtcattgaacaagaaatacgagaacaaattcgagaaattgaccgaatgaaagcagacattgaaggaactagtattacccttccaggaatgcaagttatggtgggaatttatgatacgatgaaacaaaagcttcaagaaaaactagagcatttatatgaatttaattatgtttctagtagtaattttgatacagcgcttcaattagctacgagtattgctcaaggtcttgcagaagttcaaagtgggaaaggttttagtcctgcgagtggaacattcagtatacaagatttaaatatgaactggactgcatcaattcaaaaaatcacagaggaaaaagcacgtgaatctgataaaattgtgtatagcgatttaaatcaagaagaaacaataaacaatgaaacttcattagcatcaggaaaaaaagaatttgatggtaataaattagccagagatattacaggtgaaataagtggagaatatgatgttcggcgtgcttgggaaggtgtagatccgtctacgggagagaaacttggtacttttgacagagtcatagctggaggtatggcggtagccggtattacaccaatcgggaagttggttaaaatcggtaaaggtgtaaagatgtcagctagtgctgttaaaactgtaaagggtgctgaatcgaattatgtactttttaataaaacgcatatacaatcaatgcctaaaccaaaagggagaggtccaaatggagggaagttacaatctcatcacggtttacaagggaaatgggcggaagcaaatttaagtcaatatggatatgatccaaaacttgcaccaacagtgacgattgaaacaggaaaggggttaccacatactattattactaatgcgcagaacttgagacgtgatgaacgtgtagccttaggaaatggaaaatggagctcttctttacaagcggaattaaagaatatagtttctgattttgaaaaagcgggattttctaaagaaactattagaggaactttagaacaacaatatagaatgcttgataagttaaaagtaaaatatgaaaggattgagtattaatgagtatacttgagaacttaaatgcagttttcactttagaaacacaagaacctccagcaactaaagaaacaattcaagagttacaaggtttttcatcaatagatgttccttcagattatctagagataattcaacattgtacagatgcagagattaatgtaaataatgaaatatatatccgtatttggagtccagcagattgtatagagatgaatgaagctcataatatccaaaaatatatacctaactcacttgcaattggtgatgatgaaggtgggaaagtgctattatatgcaaatggaaaagaaggatttggattatatatggtggattttggagatttagatatcgaagaagcaattaaaatatcaccttctttgaaactgttattaatggatggcgtaggtgtagaaaagttattgttataaatttaaggacatatgaaaatcactgtattctgaaaaggtaacgttaaagcatttcttataaaactttatacagcaaataaaaagaacctacatgataggttctttttattttgttaataattatttgtgttatgcattgtaaaggggtaatgacataactttgtagtatttcattgtgttaaatagtttcaccatgtgcatattgaacaaaatctactttttcttttgatacagattgtaagtttgtattgttactgaagctgaaagataaaaaacctgtgataatagcaaaaattaatagagattttttcattattttaaagctcctttctctgaagcctttttatcagcttcatttgtcatgtgtagatacttgctcgctttttcatacgattttgaatcgtaaaacttattgcctaaaatagctgaataatcttttacgtatttccataactcttctttcttaaaataacaaattcctgccaaaatgatttcttccaattcatctgtacttatattgtcatttaatccttttagaatattgaaatgatgattatactcttcgtttgaaatttttaatccatttttaatatgcaacgtgacagcatttttatcatttaatttgaaatactcctgcgctaataagaacaatgttttttggttatttacaagtgatccatttaggtattttattgctagttcggaaaggttttgatctgcgtacaataaccctaaattatgtttcacttttgctgatagtttatcctcgtcgtgtttgttgaaagtatttaaagctgcaaggaagtgttcttccgcactttcatactgaccgagggaagtacaagcaagacctagtgtgttattacaagcagcaactttgatttcataccctgcatgctttgaaaataattcctttgcctttgtagtatatttgattgctggtagtggctgataaatatgatagtggaaagaaccaaacatataattaaattcagctatttcaagttcatctggaatatcctttaataatgtttcagcttcttcgtattgctctttagctgatgtgtaatctcctatattaattgaataaattgctttaaaaaaactatgataatattttaggaaggtgtctgcttgatcaggtatacaatctatcttttctaaactatctttatagtttttaacgtcatgggtaagtaacttatatctaaaatctagtaatgaataatagataagtatattttggtcttcttcaatttgatgaatcttgctatcaatttctttcttgaaatttgtggattttagtacatgttgtgaaatgatggattgataccaattgtttagtagatttgttatttctcctttggagacagtttgcacattcatatttaatcccctcaccctattagtatatatttccataatcttaacatgttagcggaatttcaaggtgatgttgttattggaaaaataaaaattgaatattctgttttttgattaactactgggattttatttacttgctttttatatgtgtactttgttatttttaccagattcatttaaatgtggtattttattaatagaataagatagtgtttagatatttattttaagttgaggggaaagattgatgtgaaacctataaatttattgtctctagttgatgcaagtgaaaagctatcaccttccgtatttgaattatataaagaacattttgacattaaagttaaaaaagatgaaatcgaagatttaagttctttagttaaagagcttctatcatttgtaaatattttaaaaatagtagagggattttatgtaggatataaaattaaccaaattaataaagagtttgatcttttaagatttggagaagaaactattattaatatagaattgaaaagaaaaaatactggggatagaatgaaaaagcaacttttaagtaataaatattatctcagttttttagaaaagaaagttttacagttcacttacgttgccttagaagaaaagctttattacttaaacgaaaatgaagaatttaaagagagtgatattgaatttttatttaaacaaatacataaacaaaaattaattgaaattgaagacatacatcaagagtttgatccctgtaattatttagtctcaccattcaattctacagaagcctttctagagaatcagtattttttgactgaacatcaagataactataaaactgagattataaatttaagacaggagggaggaccatcctatattgcaattgaaggagctgctggaactggtaaaactcttttagcgtatgatattgcaaaagaatatataaataactccaaaagagtacttattattcattgtggaactgtaaatgctgggcatagaaagctaatgttttatgattgggaagtaacaggtataagatactatgaaagttatacctttaatgaatatgatctgattgtcatagacgaagttcaacgcatacgtaaagaccaattagaggaaatattacaaaggattaatgataacaatgtgaaatgtattttttcatatgatcctaatcaatgtctggctagttgggaagttagcaataatattcctgaatttttaaaagctgaggtatctccaagacattttccattgacaaaaacaattagaaccaataaagagattatttcctttatcacaaatttgtttgatacatcaaaaagtaatgcacatcaaatttattctaatattagcgtgcagtattttgagggtcatactagtgtgagggattatattcaagaactgactgataggggatggaaggctataaattatacgcctggttacggaaataaatattatccatatgaagtgtatcaaaacggagataataaaagcgcacatgaggttattggacaggaatttgataatgtaattgtagtgatagattctaactttttttacaataaaaatttactaacaagtaaaaaagattactattatgataatacaaaaatgctctatcaaatgatgacaagagctagaaaaaaattgcatgttattatcattgataatgagaaagttttagagaaaagtttagagattttaggatctaataaaattgttacagtctaaaaattcatgaaaataatggtgttaaactaaaagataggaataagagatatcctaccttttagtactcaaataaaaacaggctagattcttttaaaaggaataattaatacttattttgaatccgaaaaattttattttcaaatgaaaagtttttgtttgattttgcatattgtaaaacctcctttctacatatgcattttactcactttatcctgaaattctaagagcatttttaagaaacataaaattttttcaatacaatataaaaaaggaactctttaatattgcagagttcctttttgttttatagcattttacgacaacgtataataaaatcaatatctttcgttgagctatcctcattatgaactctctcaattacttcggcagcatataatttatctgccttattgtcagctatcctttgtatataatttgtaactatatatagcttcttcttgagtaatttcagctttcattaattcaacattaaagtatcccatataatccctccgatttaatgacaataaaaaatcccacaagttaccttgcaggatcacatacaaaatagggtatttcgtacttttttattttatatgaacaataaaagacaggtctataaatatgcttataccattttaaatttttagtatcgtttgaacggataatacgtattttaataaattgaatgcacacgaaaatttatcaagttgaaatttaaattaatttagtgctataatgcgagggatcaattatcatatttcttcatcaatctcatgtatttttagtaagagtttgttaatcacagcctcttaacgtaccgttaggggtttaactcttttaaataactattttgcattaattattttcagtattttaaaaaaacaaatgaatatttctaacaaaagactccattttgattaaattttttcagaatggagtcttcttaataaattgtacgattgtgtatgcattctttttatttaatatcaattaattcatcaaattttaattgtgtatgtgtattaaaagcatcaagacaatgaatcaatttgtttcctggatctatagaagtcactgttatgtattggtgatgtaaatatccctttctgtagtaagagaggaatacctcttcattgtattctaaggattgctgtaaagagcgttggattctttcttttgtatcatcagtgagtattggtctattaactttattttggtcttctagcatccgatttattttgtgatttgaattataagtccgccacaatttgaaccataatattgcccgaaagcatagtttttagagaacatccttgtaatatttgaagcattacattgccataaatcttttattaactcataaacttgcctcaaaaaatagtagtaggggtagtatcacatgcccatcaacttaaggatagaaactctacggttttccattaattgaaatgaacaaacttttaaacagtataatctttctagctagctttttagaaagaataacgttttttgacacttgggggtagtgcaaattcttaagttgatgggcatggggcggaccatacaaaatttgatttttaggtaaattcatatgtaccacatccttttgattttctgtgttattaaaatcaaaaccaattttcttctttatatctgtaagtaaactatcactattatcttctttttcatttagtcttgtacttacaccttcttgaagttttccatctagctcctgaaaaatctcttcttctatttcaactttaacaaattctttagcacgccatgttctcaagttttcaatgagtttctttccatttaaaccagctttattacacttttccacaattttatgtactaactgtttactaggcatttcccgataagttagtcgctcactgacaccagcttccttatatgacaaatctaccgacatattatccaacctaaaaacactttctgaattatcatttttaataaaaatagtaccttttttaataaaagctctttggaagtgaatctcatcatgatctaataaacgcttaattatctttcccatttcaatagcttactctaactctattttattttcggtagaaaattccttccccatatatgtatctaattgtttcatctctttgagaaattcaaaaggaagcataaatgatttatccgtagtattacgaccatgtgtatatcgataccccattacaggtcggttatatacctcttttacaattcctttatgcgtaaccattagtgcccctgtaatctttctctttaatatggagtcttttatgtcatttttaacctttgtccctacaacaatataaactgcatcccctatattttctttcatttgttcatattcattccctttttgttgatactttgtcttttttgcaagcgctcggggccaataaaaagtacctgcctttataaatgcttcaaattcttcgactgtgttagaaaaaaaagaaaatactctttccaattaaacctttccctattgcttatatttccaaaatatatcataacatttattcctaatatattaatacaattaacaaaaagtatgcttcctttagacctttttattaacaatttaaaaagaagattattagcaataaaccatttacattcaatcttattatgccattttctttcgcaatgtaggataccacaccatcgctatcaagttaccaaataaaaataccctcaaaacgcacagggccgtgaactaaaaggatctaacataataatttaccttataggtaatcactgttagatcctttcattacccaagatatttaaataataactcctcaggtttctttgtttatatgttttgaaaaaagttgaatgttaggtttttatagggttatttcttttaattactttaaaatcctccaaatggacctataacttctagctaattctccgtatgctctttagttttttcaaagagagaacgaattgcatcagattcaagtgtaaagatctgatgacttttctttggagtggatccctttcttaagattaggttataatcagaattataccttgttctagttttatcgaggtctttaaggtattttacatattgtgcctttttctcctcactaaagttaaacaattccccaatgtattctgtattcctaattaactcttcaaataggttctgatttcttgaatcaatgttaggattcgatagtaaaactgattctttaaaattaatagtatgctcttcggggaaaaaagatattttttcccctggacaacctaataacgcacatatttcttcttgtagctttttacgggatttctctgtgtaaccaataaaaaacaagtgtatattcttaaaggatctcatcttctctttaaaagtaatatgctgacttaattgaataggatagtatttttccttatcaacaagtttttgagcggtttcttcaaccaaatcacttgatagatagtaacgttttaaggcattgacagtttggctacctgagattccgatttcagataatattactaaatcataatctgaggtaggttctgttaaaactctcgattcaaactgatcaagtttcaattgtcttgtatgtggaaatccacttaaaactaatctgtggaacccgttatagtcctcagcggatttgatatgaaaaaatattttattcgtacatctaagagcagcttcaaccttcacaaagaatttttttatatcctcctctttaatatattgatggcttgcaattacatttagaagagcttgatgatattttgggtcaaatcttctaatccaagctattaagtcggcctcaatttcctttaattctctttcctcataaaaagattgttcctttattatgtcaactgctcgactaaagtacggagagtataaaatttctttctcgatttggatgttattgatgaaacagtctaaatttattaaatccttttctttttcatactttttatacaatttctccctaatatttatacaatcaagtgttttgctgataatgtcaggcataataaggagtaaatagccatcattagacttgtaagcaaaacaatactctgtattttctaatacattgacatcacttaatttaaatttctgcatcaaggaattaccttgttgaagttgatatatctttatgctgggccagtcttcttctggaatgacccaggtatcattgtctatatcaatcttaatttcatttaagttatcatcataatcaaaggtgcatttttttaatacatccacaatctgaagattttcttctactgatatatgggtagaaattaaatgctctaagaatcgaatctccttttcccatatctgttctaataaagtgaaatcataacagttaactgagctcatgatactattttttattgtttcaaaaacatgaccgatagagttagttttaatatcaacaggggtaaataaaagctttagtaaatcagagttttccttgtatagagaatgataatattctaggtaaagatagaaggatcttttctcttccccaagtgttttagttataatatcaattaaagatacaattgttttaaacttacacagttcaaaataaaaggcatcatctatttgatccttttccaagatagttaaaaatcttttcaaataaagtatttttaactctgcatcttcctgaatcttcttcggaaagaaatttgtatttatctcagatgtttttattgtataaggtttacccctgaataactcaatgttggtattaattttattaaagaaggttaaatgaaaattttttgtgttattctcaactacctcattttccgataatactaacttattatcataactagagaatggtattaacggaaaatacgtttctttattaattaaatcataatcacctaatatacttggaaacttttctttattttttataaactttttcttaaaaacaccaatactttcaaatactcttattatcttatcgatataagagtgaaagtctttttcgttgctcaataactgatgcagagatatataatcgtgtctgttgtatctgaaagttattgatacatactcaccgtctagccacttttcatcttttatttgaacttcctttaaataatcaaactctaaatccacaacttctttcctagaaattcgaactagtaactgattaccacgctgtagaacaattctatcattttcaataacattccgttgcccgatttttttatttggaaacattgaaacttctttttcattaataatccaattaataaattctaagttgtattttttttgaatattttctaatacattaatactttcttcattcagataatcggagatactttctgaatcttcttttgcttccatcaagaatagaacaattccagtgtggaaatgatcatataacttaagtgtatcaatattactattaccatctacgaagttatcatgaaccttgatagtcagtattgtgtttaagttatttcttgttaatggtttgagctttaaggtggaagttcttcttaaccaattgttgtaatctatattgatggtagggaaataggtatttacataagttattaaattttcccaaactcttttaatattagtgaaattttgctcagtcaatgttaatagacagcataagtgataatacttattgatagtcttcctgctgtctaaaaaatttgattcgaagtctttaggatcattagttcccatggactgattaatcttattaaaaaacatttcagaaactttaattataaattctgaagataaactattgtaaaaaattaaatcataagtattcaatatgaattctttgatgtcacgttctttctcaagagtattcagaatccgctcttctaggaattctggtatgactttttcgaatttgaaccttaaaacttttaatagagtttgatcgtgaacttttaatataaattcattttggacaaattcattttctaacaacattaaagacagtattaattctgtctcataattatttacctctgactttacaaactcatatattacattctttgtcttttctttgtcagtgtaattcttatagtatataacctcaagtaacgtgtttaggaaaactcctttgccaagtccttttagagctttggtgctttcaactaagttattgaaattattatttgttgaaaaataataacggaaatagtttctaaatagtgacccccggcctatctctaaattaaatagatagtgctcaagatttcttttttcctccaatagacgcttattattattaaaatgagtgaaataaaaactcaaattttcttcattgacttcaacaatggttggtttaaccattttgctgagtaggcgtgtagcttttttattaatgaaagatgaattggtttcttggctttttgaagagttatctataaagtacttgttatcattaaaataactttcaaagtcacttttagagttcttcacctgggaaataaggtgcttatcccaatttaaatgtaaatctaatgattctaaataagtttgtatcttgtctaaagtttctttagctttttcttcattttctagaattagaaccatgtcatcaacatatctaaagtaaaagttaaagttctcttcaagcagactttgtatgtatttatctaactcaattaaatagacttctgctaaatatctagcaaatgcggggccctgtggcacgcctttggcttccaaattatctttttcacaaagttttattaagtaatctatcaaatgattatatttactgagctgctcacttgagagtgtatttattttttctttaattatttctgagggtccatgaattaactttgtttttaatcttcctaaattaagacttgaatagaaatttttaatgtcaagttttattacgtaatgttccgcgagtatgtcatcgttaagcctttccataatattattccgatagattaaccattgttgcatccatggtttaaagatattgtagttagcaaaactattttcaaatttataaccgtaagatccatccgaaaattctgtataatagaaggcattaagtatttttataaggtatgtacttattattttttcttcagcttgaagtgcataaagacttcgaaccttactatttttttctaaacgggagaatttataaggttctcgtactgtatagttaccaacaagaacattttctatagcttctttcatatccttgacatcgatattttcaagttctaactgagtaaataagaatgcaatttcatcgttttggttagtatacttcctttgcgctttaataattttgtctatttctgatttctttacttcaaaagcatcgtaaggtaataaatcaacatcaagaaacttaagtggagatgttgtctttaattcgagaatatctttattttgaagactacaaccattttcacacttgcaattatgttgagagaacttatttcttaagaaaccacatgttggaggatgcaggttaagattctccaacttttttctggtaagttcaggtttgaaattatccattctagagaaaaagtcccaaagaatttctttcccatagttatcattttgaggggtcttcaatttattcagtagaccaacaaatattattctttcactctcacttaaattgtttggatatttctttaatatgtcatctataattgtacattgctttattttttttagaacatcctctagattttcatatgtctcttttaaggcattctttgttggtatgaatgggttagtttgtatagtaatctcttctgcttctaattttaaatttaactttaaggctacatctttaaaactttgcttttgataacgtgatagcaaagtaagttgagaagaaagaaactcttcatcaaatttatttttccatatttcagttgaatatacgaacgaataaatgttatctataaaataagaatagctctgagacttggtatgaagagataaaggcagtttcaccccaaatcctaccttattattgttattttgaccattcttaggaaaaagatcgacattgatataaggactcggattattattaatctcctcaactaacctctgtacaaactggaaagcatgtgatttttcaacaggttcagtgaatattacccaaacatgtatacctctattacctgaaaattctgtaagataatcaattttatatgaatcaagaaacttgcaaatttctcttacttcattgataagtatatcaatgtatttttgttgatctttaggaaagtccttttctagtatctttttatctatatcgaaatccaaacaaatccattttaacctagttttaacttgctgatatgtgagatagcttttctgattaattaacatatcatttattcgcaaaggatcaaaaatattattctttgtactatatttcccgttacttagttgttctgcaaaatacttcttattaatgacaaagttttcatatagttctgttgcaagactcttatataaatctctaatgtctactttaacgttcctagctagcaccgactattaacctcccacgatttcttttacttacttctctttaaaattttaacagaatgaagaattgtttgtaatagttataatggaaattctttcttcctaattttcaaaagtattaaaagacagtatttcattccataaaacataactgtacgagagctttattaatatgaagtgtctgttttaaaaagtgaggttggttttcaggagtattttagttaaagtataaaatatggactttattctgattctactaactttattgcaaagatacattattttagatttcttatcttttctaaaaattcccttagtcttctgttttcacctttcaattcgctcatttcgactaactgaataattaaattttgtttatcttctttgagcttttttatctcttcatataaccgctttattttatcttttgatgcatcagcaggtacaccttttccagtttctttgtatgcctgggaaatgattgaatacaaagcgagatcaatcaatcgttttgttaattagaattgcttgtgcttaatttggatagatacgaaacttatagactttattaattatcatttgattcacctccatttcggtatatgaccactatctaccgaacgtatattcgatatatagcgaagtaacactttaagtatgtcgaacaattaagatggctccttgccatcccttgttcaaagccaattcatctcccacctactcacttcgcgttccttgaggaaggagtcttcttggctaaaatgataaacttatacctacaatatctccttaatatatatttctttttccttttatataaactccaataacctctaaaaatatataattttagacataaatttacttataacgatcttatttatttaaattttctgtatttttatataaaacatatccaaattctgttattattaatacatatactgtaataggatgaggagaatacaatggatactttagtcacagaatatgaagtagtcgctaatatgttaaatgattggtatattgaaatccgtgcgagacgaattgataatgctcatcagctaaaagaagaaattgataatagaatgaaaggtgtctcggatcagagcttacacttatattattcactattagattttcgttataaatatatagtagataatttaaatatttcaaagggttgcttcgacaaagtagaaacttttcaaattccaaatgataatatattaacctactactatcacttctttaaagcaattcatgcaagtaccgtaggcagctattcaatagcaagagatcattatgataaggcagaagaacttctaaatgaggtatctgatgaaattgagcaggctgagttttactataaaattggtgccttccattacgatgtttacgaatcactccaatcaattaagtatgttaacaaagctaaagaaatattctcaaaacatgaaggccacgaacgaaatattggattctgtgaaaatcttttaggcatggcatgtaccaatttaagagaatgggcattagcggaagaacatcttgtaaaagcaatggatctgttccaaaaaattggagaagaaaaattcactataatggttcgtcataatttaggtttattatatgcagggcaaaatatgtctgaattagctattcgctacctctctgaagtatccgagaagaaacctaaccactataaagccattttcatcgagggcagggaacactctaaactaggaaaccaagaaactgctaatactttatttgaaagaggattacaactctgtacagaactaaacaatgaagaatatcagcatcggtttaaaattttgagagacattaataataatatcccagctgaaaaattagaagctacagttcttgcaggaatcgaatactttgaacgagaagatttatatgagtatatctatgaatgctgtaatgttctagcagaaaggatttttgaacaagggcagcatgccaaagcaggtacatacttctataaagcaattcaagctaagaaaaaagccgacgcgaaaggagctttaaaatgaaaaaactaattaaagtgatgagtattgctactgctttactatttacattgggaattacatctcaaacagatagtcacgtagtaaaagtcgttcaaagtatgatggcagacggagaccacggtggttgatattccttgacccagaatatattcctgggtctttttttattgaaacaagatataaatcgtcagttttaactatatagttgagaaggaatgcttataaaaagaaggaagtattatctacataagagacggagtttataaccaaaagattcatgtcactcattctggtgcctcaggagcacccattacttttcaaaacttccagaataaaaaggtcattttcgttgattctaaagtcaaaatagataataatagatttatttacaatagaagataaaaattatattcaagtaaatcgattagagttttacaatctaaaatcaactaaagttaacgaaccccctattgatattagaaataattatatcaataccattgaaacaactttaaagaatggaaacacatatgatatcgctgtctatggtacttcatctagtgtaaaaataattcaagtgatagtttcattgatatttgtaaataacgaatttatagcatctgtaactcaagacaaaaatgttaaagggatctttaacatttttaattaaatgaacaaagttttatcattaggagttgcaattaaagatttacccggaccaattgtgggtttattacatatataattacaaccttttaatcttatagaagctttatctcacgaaaaaatataaatataaaataaaaagccctctattgtaaggggcttttacacttcaaataggttttccttcaaataaagaataacagttaatacgttttgtttccattatttttaattagaccaatatcaaccaataactgatgatttgtacgatctacgaacaaaatattttctcatagaatacttatcccagttactagttatctattaagaaatatagaatacatcaattaattttaaccttgtccaacaattactgtaattgtatgatctaatacaccatttctataaacatatacttttgctgttgtggaaaaataagttgttaatttcccagtagaagaaacctttattaaatcattactagtacgataagtcattcctggctcatgataagtaagttgatatccattaaaaaatgttggtaaagtaactgtgtaatccctaatgttgagagtttgtgttaattttttctggtcttccctattaaaatcagtggaagcctgtgaacctgtggttccgatacctaaaatacttagaaaagcaaccgacgttacaagagcataacgaagtttcataatattaactcctccctttataaatgatttaaataacaatagggatttattaccctactagcaagataacatgaaatatatgtaaataaaaccatttgaatgggaattttctgtgaacatatattttatcaacaattgtacataaaaattaattattgactatcctataaaaaaaattaccaacaatttcttaagatatattaattttatttaataacgcgctccttcatcagaataaaaaagtttatcttcttttattaattatttgaaaatctcattaggtatattatattgatccagaaaatcactttcttgtacttaaccttccctattcaccttgttgaatagggagattaatctcttttaaaaatctcgatcttttagaaggtttcccattaattgttgctgggaatgtaatatatagattcttctttggacgagttacagcaaatggtgataggtaaccctttgaattaatctccaagttttcccccaccccgcaccgtacgtgcgactttcatcgcatacggcgctccatcttcttatatattctttacaactgttatataaaaagacttgagaccttccctccgccacttattatcatggtttcattggtactacatctctactgccatctctactcacaatcctttttaccagattattactagacgttagagacttcaaacgttccgatattgctaggtaaataactatacttaggttctacctttaccccgaattcacgttatttaaactaaagcaacccattagctttatccatcaaaatctgtacgataatttctttggagtgaatttttttattttatacatttctatataaagcttttcgaggtgtacattcagtagttcgtcatcaattatgttgaatactaaccatatatagctccctgcccgcattactttcgcagtgttgtttaacctttcctcagcattatctgttagggctactcaatgcgtcttcacccagcttcatacaaaaccgttaccagttatgcatgtgggagtatcagcagccatcttatcataggatttttttaaaggcatcctactgtggtctcacaatatcagttatcattataaaaatttataatgtggtttatccctcgttaagcgatttcaaaccaacgtttcgcaccatacattaagcgcctttcttcttctatagtagtcggtggttcagctttctctatggattcctggattatttctggagtaacttttgtggcttttttacttggtaatccttcatcatataagcctattaaaaatacatttttaaatgataatcctttactcttatgtatagttaataaataaattgcattaaatgtacctttatggtattcatctaactttttcttcatctcttcttttttttggtttaactcttgataccttttgaccataccttcccatgattgaaactgttctgtttctttttctatccattttatttcatcttttgttaactggtttctaacgagtggaaattctaaaaaatttttaataatattttccatagatactgacttcttattctttaatcgtactaactcctcaaagtaatcaataatctctttttttctatccaaagatttatttccacaaataaaatcagcaattttttgtggatttaaatatgatgaactatctccaataaagttaacaacttcttgttttttcttgtagaatgcatatgaagtttctgcaattatttggttccatcgagttaatttatcactatcttcattagatattaaaaaagctttccaatatctatatgcccttttaaatgcatccaagctaaaaatacccattaagtcgtcattagtttctattacaaaagggatattattaacctccagtttatggagtaatgttttaatttgggaagtggaacgatataaaattacactttctctataatctgggacagctttatttcctgataaaccaatatactgagattgatctataatccattcagcttcttcctctggagtaggtaaacttcgaatatagcaatcaccctcatttttatgaaaaggtttcattgatttttttatcctattgttctcattaaatgcaattacccgattcccagcttgaactatttttgaagtagaacgataatttgtcataagtttaagagtttgggtttcatacatttggttgaaatcttttatgtattttggctctgcgcctctaaaataatagatactctgatcatcatcaccaacaatgattaatttagctccgtccttcaaatctggtgggcaaataagtttaatgatatccatttgaagaggattagtatcttgaaactcatcaataaatatatactgaaatcttttttgtacatattcacgcgcttgaatatcatcttttaaaacatgaagcaaatttaacatgtaatcgtcaaaaactacaattttattactttttcgtttatcataaaattcccgcatcatcttttgaaatctttgacttaaagtttcatcacttgttggttcaagcacattaaaatgcttctctatatattttgtcatcatctctatggagaatcccatattcgtccaataacttattttttcaaataaatttttctctccagcattttcatctaattttttcaaattataatctctaattaatttatttaattctttcttatagctgctctcatccggattatctccaataatgcccatttgctctacatatggaaattgcttttttaattcattatacaggcgtataaaaaagctatgaaaggtcccaactgctactttagatttttcctcgtctaagaaaaaattcactctttctttcatctcttcagatgcttttttcgtgaacgtaatcatggctattttttcctcagggacattcttcatcagtattagatatgcagttttcgcacaaattgtctgtgtttttccacttccagcacccgcaataattctaagattcttttccatatcatatctaatagcctcaatttgctcattattaaaatcattattatcatttttaggctttaaaaaatcaaaaaaacctttatcttcatcatactcagaaagaacatgttgctctttcccttcatcatactcaagttctccataaataccttgataaagattcataactttttcagcatgcactgattcttttattttggtattaatagaatttttagcatgttcaagctctactatacttctatctaatgttttatctaatattttcttctcttcttttaacttttcattacttgcatataaattttttaatgaattatttttttccttaagttccctttctaaaacttttattttttcttggaatagttctattttataaatgctaacttaaatatgtacattaacgcttgaataaatatgtacattttcaattggattctccatactgactcctgtgttaccttgagcgccttgaggtccagtggcaccagtagcgcctgtgttaccttgaacaccttgaggtccagtaggtccaggaggcccgccagaaggtccagtaggtccggtaactcctataccagtagcacccgtgttaccttgaggtccagtggcaccggtagcgccagtagcgcccgtgttaccttgaggtccagtggcaccagtagcgcccgtgttacctcgaggcccagtggcaccagtagcgcctgctggtccagtaggtccggtaggtccttgaatgaacgaagcagaattaactagagcagtttgtaatgctgctattaatttaaggagctcttgaagtgtgcaagggtcaattcggaataattttgtaatgtatagtaaatagttaatgagattttgaagctcaataaatacagcgcttgctacaaaggttggatttcttaatatagttattaagtttttaataatagctaacccttgtgctttcagggaggaagtagcgtctagtgaacaaataaatttactcagtaggttcaatgtatcgattaggtcttcaatattttggggagatggatttgcgaaaagttttgggattatttttgttaaatcaataataatcgcacgaaatgttctaagttgagctttagtaattgggattgatggagtattcgggattcgtccggcgctacttggaaagcatggtttggagaatttgttttgattgtcgttataacgagacattaaatctctcctttctcacgaaaatgtgaacgaaactcatcatagtagatgcagaaattagttaaatggtcatagtaaaatcgtttgtttaaagaaaaaatagaaaaaacgccttacaataaggcgttttttctattttctgcgtattgataatatcgctttaaggaaatttttgatttgaatccagcgagttttataatttctgattcaggagtttctttttttattaagtttaaaatataggtgttacgaaaatgttgtcctgaaattcctttacgtaaattggctctagccacttcgaggcgaatcattttttgtatagcaatttccgttaatgcctttggtgcatcattttcatatacccacctgtatgttccacggttaaaatcgaatgcgacaaataatggatcatcactatggtatttaggacgaactggttctgggatgcttttgtaataattatatagttgttttttgtcttcttttgctaatgtaattgttctttctacacctgcggttgctgggattgataatgtattagtttcaaagtgaacgtgatgcattgttaatgctgtaagttcctgtaaggataaaccgtagtcaatcaatagatttaaaatagcaatattgcgatccattaataaggggcgcacaggaagttgtttttctgaaagtccttctaatgaagtgactatatactttaaccttttttcttcatcaggtgaaatgaaatcttcgttacgaagtgtacggtctggttgaatagatatttccatattcttcaatggattaggaatgtttagaaaatgatgcattctatttagtacaataaatacacgatgcatcgttttttctgagtaatgtcgattcgtttttaaatcggaaaagtaatcttcgtagtcttttgtacaaagtgtagcccatatattactggaagggagctttttgtttttttctaaccaatgtccgaagtcttcaatgtcataaacataacgtttaatagttgagggttttcggcctttattcaataaaaaaatagaaaaggcttgtattgtatcatggaattccgttgtctccatagtcccaccaccttaattatttcttatattatagcaaacttttctgaaaataggcatttacaagggggacaggaataataatatttggtgagtggataaaatgaggtgattgtatggaacaatcgatgcgaaagaaaaacaacaatcaaattaatattgtgttaaaccatcgaaagaaaatttctttgccagccgcagaaaataaaacggtaatttcaaatgaaactgcaattaaacatgaaatgctgcagagaattgaagaagagatggggaagcttgttgggatggaggatataaaaaagataataaaagaaatatatgcttggatttatgtgaataaaaaaagacaagaaaagggattgaagtcagagaagcaagtacttcatatgctgtttaaagggaatccaggtacagggaagacaactgttgctagaatgataggaaaattgctgtttgagatgaatattctatcgaaaggccacttggttgaagctgaacgtgctgatcttgtaggagagtacatcggccatacagcccaaaaaacaagagatttaataaaaaaagcaatgggaggtattttgtttattgatgaggcgtattctttagctcgaggaggagagaaggactttggaaaagaagcaattgatacgcttgtaaaacatatggaagataaacaacatggttttgtattgattttagctggatattcaagagagatgaatcactttctttcattaaatccagggcttcaatctcgttttccatttattattgagtttgcggattactcggtaaatcagctattggaaattgggaagagaatgtatgaagatcgtgaatatcagttatcaaaagaagctgaatggaaatttagggatcatttacatgcggtgaagtattcgtcgcaaattacatcgtttagtaatgggcgatatgtacggaatattgttgaaaaatcaattcgtacacaggcgatgcggttgttgcaagaagatgcgtatgataaaaatgatttaattggaatatcgagtatggatttgatgctcgaagaggagacgcacagtacataaactgtgcgtcaatttttgtgtataagttcgtttactctttttttgctttttcttggtgtgttttatggaagtgttccattttagcgctcttttcgtgtgctgaattaggatcgtgtccaaattgatttactgagcttttttgagctcctttattaacgtggtttgtcatttgtattcacctcactttaaaaattagtataaacattatataaagaaaaaatcgttagaaaagaaaaacctctttacgatatgtaaagaggttagattgctatttatgcattgaacgttctttcgtttcgatacgtctgtgcggtaaatgccatttgtaatgaatagaaaccatgcggaagcaaacaattaaaatgaatagaatgtaaagagcccaatcgctaacaataatttgagctccaattaagaaacctgctaaaattgtccaaaaggcatatacttcagctcgaagaacgagaggttttctgcgggctaaaagatcgcgaatgataccgccgccgataccagttaaaacagctgctacaattgtggcgctaattggtaaatttaatttttgggcatataatgctccttgtacagcaaatgccgataagccgatagcgtcagtgatattttcccactttttccaatgtctaattaacttatttggaaaaagaaaaataatagtcattgataaaagtgcgatttggaataacatgtcttgttgccaaaacgcgacaatcggataaccgattaataaattacgaagggcacctcccccaaatgcggttgccattcctaaaatatacaccccgaaaatatcataatcctcttccattgcaacaatggctccgcttagtgcgaaagcgattgtgcctatgatgctaaaaatctcccatgccatgaattttctcccccgctaactagatgaaatgtgcttcctctgctattatattagaaggtttaaatttcgaaaaggatgagtgaacatatttgatggaagaaaaagaaaaagtcatattagtaggctgtcaattgccacaagatgatgatgaaaaatttatgcattccatgaaagagcttgcatcactagcgaagactgcacgagcagaattgttagtgtcaacaacgcaaaaacgaccaaagtttcatccggcaacttacataggtaaagggaaattagaagagcttacaatgttaactgaagagttagagccggatgttattgtatttaataatgaattaacgccgagtcaaattcggaatttatcctcagtattagatgcgagagtaattgatcgaacgcaactaatactggatatttttgcgcaacgtgcgaagtcgagggaaggtaagcttcaagtagaattagctcagttgcaatatacaatgccgcgtcttatggggcaaggattgtccttatcgcgtcttggtggtggtattggaacaagaggaccgggtgagacgaaattagagacggatcgtcgtcatattcgatcgcgtattgatgaaataaagaaacaacttgcagttgttgtggaacatcgaaaaagatatcgtgagagaagaaaagataataaagtatttcaagtgtcattaatagggtatacaaatgcagggaaatcgacactgtttaatagattaacggaagctgatacgtttgaagaaaaccttctgtttgcaacattagacccaacgacaaggaagatgccgttaccttctggttatacagtattactaactgatactgttggttttatacaaggtttacctacttcattaatcgctgcttttcgttcaacactggaagaagcgggggaagcagatgtcattttacatgtagttgattccgcggatcctaactacatagggcatgaaaaaacagtaaaaagattattatcagaacttgaaattaaccatattcctgttattacgttatataataaaaaagatgaattacatcaaaactttattccgtttccgaaaagtgatttcttaatgactagtgcttttgaaaaaagtgatttattgcgtataaaagaagcgatagaaacgaagatgaagaaagaaatggatcgttatcgagtggaaatccctccgagtgaaggtaagttgttaacgcttttaaagacggaaactctattagcaaagatggagtttctagaagataaatttgtatatgattgtgcagggtatatttttactcattcgtcgcttaatgtgcaattaaagagatttttagtggaagaaggagaaaataaaaatgtttgatcgtttgaaaaatggagaaaaaattgctccaatcgtaaaagaagtagagagtcagattacagaagtacataaacgtgcggatgaagtaattgaaagcaatcagtttcgtgtattagaaagttttcgtaaacataaaattagtgactcgcattttatcccgacaacaggttatggttatgatgatattggccgtgatacgttagaaaaagtgtatgctgatgtatttggggcggaagctggacttgttcgtccgcaaattatttcaggtactcacgctatctctacagcgttatttggtattttacgcccgggagatgagttattgtatatcactgggaaaccgtatgatacgttagaggaaattgttggtgtgcgtgggaaaggtgtaggttcatttaaagaatataatatcggttacaatgcagttccgctaactgaagctgggcttgttgattttgaggctgttgcagcagcgattcataataatacgaaaatgatcggtattcagcgctcgaaaggttatgctactcgtccatcgtttactatttctcaaattaaagagatgatcgcgtttgttaaagaaattaaacctgatgttgttgtgtttgtagataactgttatggcgagtttattgaagagcaagagccatgtcatgttggtgcagatttaatggcgggttcgcttattaaaaacccgggcggcggaattgttaaaactggtggttatattgtcgggaaagaacagtatgttgaagcgtgtgcatatcgtttaacatctccgggaattggcgcggaagctggagcgtctttatacagtctgcaagaaatgtatcaagggttcttcttagcgccacatgttgcaggacaagcgctgaaaggtgcaatttttacagctgcgtttttagaaaagttaggaatgaacacgtcaccagcgtggaatgcaccaagaacagacttaattcaatctgttcaatttgacgataaagaccgtatgattgccttctgccaagcgattcaatatgcatctccaattaattcgcattttactccgtatgcaaactatatgccaggctatgaagatgatgtaattatggctgcgggaacatttattcaaggtgcaagtattgaattgtctgctgatggtccaattcgtccgccttatgttgcttacgtccaaggtgggttaacttattcacatgtgaagattgcgatttgttctgcaattgatgcattaattgaaaaagaattattaacaatttcttaaggggaagctgtcgatttcggcagcttttttcgtataaaagtaatgatttatgcgattagaaaaagaatgaaaaaattcataaaaaaaattataaaaaatcatgtaagaaaagctaacatctattgacactaaacataacatagtataaaatgagaagcagttaaggcgaaggaggaactgaaaaatgaaagaagatagacgttctgccccgctgtttcctattggtattgttatggatttaacacaattgtctgcacgtcaaattcgctactatgaagagcataatcttgtttctccaacccgtacaaaggggaatcgtagattattttcatttaacgatgtagataagttgttagaaattaaagatttgttagatcaaggcttgaatatggctggtattaaacaagtgttactaatgaaagaaaatcaaacagaagcagtgaaagtaaaagaagaaacgaaagaaatttcaaaaactgagcttcgcaaaatacttcgagatgaactacaacatacaggtagattcaatcgaacttcattgcgacaaggtgacatttcaagattttttcactaaagataactgattctgaaggcgattagagggactaaggaggaatttataatgtctagatacacaaaagaagatattttccgtttggcgaaagaagagaatgtaaagtatatccgtttacaatttacggaccttttaggggtaattaaaaacgtagagattccagtgagacaattaacgaaagctcttgataacaaaatgatgtttgatggatcttcgattgaaggtttcgtacgtattgaagaatctgatatgtatttatatcctgatttagacacttgggtaattttcccttggacagctgaaaaaggtaaagtagctcgactaatctgtgatatttacaatgcagatggcactccatttgatggagacccacgtaacaacttaaaacgtgtgttaaaagaaatggaagctttaggattttcagacttcaatcttggaccagagccagaattcttcctatttaaggttgatgaaaaaggaaatccaacattagaactaaacgataacggtggatacttcgaccttgcgccgatggatctaggggaaaactgtcgtcgtgatatcgttcttgaacttgaagaaatgggatttgaaattgaagcatctcaccatgaggttgctccagggcagcacgaaattgactttaaatatgcaaatgcaattcgctcatgtgatgacattcaaacattcaaacttgttgtaaaaacaattgctcgtaaacatggtttacacgcaacgtttatgccaaaaccactatacggtgtgaacggttcaggtatgcactgtaacttatcattatttaaaaatggtgagaacgtattctttgatgcaaacggtgacttacaattaagtgatgatgctcgtcacttcatcgcaggtattttaaaacatgcaccagcatttacagcgatagcaaacccaactgtaaactcatacaaacgtctagtgcctggatatgaagcgccttgttacgtagcatggtctgcacaaaaccgtagtccgttagtacgtatccctgcatctcgtggtattagtacacgcgtagaagtacgtagtgttgacccagctgcaaacccatatttagtaatggctacattattagctgcaggtcttgatggaattaaaaacaaattaactccaccagcagcagtagatcgtaacatctatgtaatgacaaaagaagagcgcgaagaagcaggtatcgttgacttaccagcaacattagcgcaagcattagttacattacaatctaatgaagtagtatgcggtgcactaggagaacacttacttgagcacttcatcgaagcgaaagagattgagtgggatatatttagaacacaagttcaccaatgggaacgcgatcaatatatgtctctatactaagaggcttgaacccttgatacaactcgtatcaagggttttttaattcccaattattacacttttatgtggttgcaaaatgaaaaaagccacataaaagccacgaattaataacaagtagtgatatcatagaaaaacattatcagataaacgtaagttttatataatttgtgaaatgaaaaagccttgatactacggtatcagggcttttttagtgaagttattggatatattaactactaggcaatggattatttttggttattttgaatcatgttactaagaaaatcttttcaaaagaattgattttatctttttttaaatcacttgtgctataacttaataattctttactgcttgtacaacgcgaccaatgatttttacgtcctcatctgcaaggctgtaagtttgtggcttgtgaatcgaatcattactcaatgatattaacgtaatgctgcttagttataacatagtcttattcaggatttcgttagttcattttctaaattttggaaataaatatagcttagtaccttgcaataaacaataccgagtggtatattatggataagataggtactgtgcattgaacagtactaagataggaaaggaggatggcacttgaacgttcagtttaaaaaaggtgtgcttgaactttgtgtattagcacttgtaaaacgtaaagatagttacggttatgaacttgttcagcaaatttctaataaatttttaatatcggaagggtcagtataccctttattacgtcgtttgacgaaagaagggtattttcaaacgtatttaaaggaatctacggaagggccacctcgtaaatattatcaattaacagagcaaggggagacgcaatttcatttgttagtaacagaatggtgtgattttgcgaaaggggtacaagaaattattgaaggggtggaatgggatgagtaaagaagggtttcttaaagaattatcaagttatcttagaaagttaccagaggaagagaggcaagatattttattggattatgaagagcactttcagtttggactagaagaggggaaaactgaatcagaaataatacaaggccttggttctccgaaagtaatagcgaaagaattacttgcgatgtatcgcttcgatgaaatgaaaaaaaatccatcgacttcaaatgtgacaagagctgttatggcagcgattggacttagtttgtttaattttattattgtgttaggaccgttagtcgcaattattgcttttatattttctttttggatcggtggtattgctagtgtagtaacaccatttttcgttattggaaaagtatttatgggtacttttatatggttggatcttttcgttagtataacgtttgttggagtaggtttattgttatgtattatcgctttttatagtacaaagtggtttaagagattgtgtgtacgatatgtaatatggaacttcaaaatgataaaaggagagtaaatgatgaaaaaactatttttaatcgctattgcttgtatcattattggagtaataggaatttcccaaacatatgaaaaagcagtacaaactgctaaaaaaggcgataaagaaaatgtaattaaaaacgaaacattaaaaaatatagaagttaagttagatgccggggatattattgtccaaaaatctcctgactcttctttttatatcaagcaatcaggagatgtacgtaaacaagagattcgtatcgcagaagatggtgacacattaaaagttattggggaaagagaaaaaggtgcttcatttgatttttctttttacgattttaggtttcaaacgtctaaattgactctccttgtgcccgaacgctcttaccaagatgtaaaagtaaattcatctgctggacaaatcgagatgagtgatgtgaaaagtgatagcgtaagtgttagaacacttgctggagaagtagagttgaaacaaataacggctaagaatgtggagggatcgacaaaagctggtgaggtgaattttaagaaggtattagggaaagtgaccgcaaaaacaacaagtggggaaataaatattcaagatcatgattctaagtataatctagaagcaagttcaactgcgggagatatagatattactttatcggaaaaaccacaagatgcggtaattactgggcaaagtgctgccggagatgtaacgatttttaatgaagaaaataaaaacgtaacaattggaaatggtagtaaaaagattagtggtaaaacggctgctggagatgtgacgattaaaactcgttaataagaaatagaatgcatggaaatctatcaaaatacaaaaaagaagataattaccgtatataaataaggtaattatcttctttttattattttttaatgtaaatcacgatatacgccaattactttcccgataactgacacttgttttaaaatgataggttctaatgaagaattttctggttgtaaacggaaatggtctttttctttatagaaacgtttaacagttgcttcattatcttctgttaaagcgactacaatttcaccattatatgcagactgttgttggcgaacaacaactaaatctccatcgaaaataccagcttcaatcatactatctccagaaatacgtaacatgaacacttggtctgctccagcaacaatactagctggaagtgggaaatgttcctctacgctttcgaccgctgtaattggtaaaccagcagtaacttttccgacaattggaacttgaataacagattgtgtttccgtatccattcggtcttcacctaaaatttcaatggcacgtggttttgttggatcgcgtcgaatgtatcctttttcttctaatcgtgataaatgtccgtgcactgtagaactagaagcgaggccgactgcttgaccaatttcacgtacggaaggtggatatcctttttcttgtacttttagcttaataaagtcgagaatgtcttgctggcgtttcgttaacttttccattttttctaacacctcgttttctttcatttttcttattaataagtataacatgtgaaaaaacattctacaaacataagttcgaacaaatggcggatttatgttacactatagggaaataatagggagaaagaggggttcaaaatgaatgcaattatttatgcacgtgtgagtacaacgaaagaagcacaagaaacatcattattacgtcaaaaagatgaattattgcatttagctgagcgctatcaaatgaatgttactaaggtgattgaagagcaggctagtggatatacaattgaacgtgacggtatattagaggtgttggatacaattcgagacgaacaaattgatgtgttacttatacaagatgaaacgcgtcttggtagaggaaatgcgaagatcgcgttaatgcattgtttacataaagaaggcataaaagtatatacgcatacacataacggtgaattacaattgtcggattctgattcgatggtattagatattattggtattgttgaagaatatcaaagaaagattcataatatgaaaattaaacgaggtatgcaacgtgcagtagaaaaaggttatcgtccagaaaaaaatttaaaaaatcgtcatttaagtgtaggaagagagaaaaaagaagtgccaattgaggaaattgtacgtttgcgaaaaagtgaactcacgtttgaagaaattgcagcaacattacgtggatttggtcataatgtttcaaaggcgactgtacatcgtagatatgtagagtatacgaagcaattgcttgataaagaagagtaactattgtatgataataatcagttttgattagaagggggattcgagatgattaatcacgaactcgttgaacgcattaacttcttagcgaaaaaagcaaaagctgaaggtttaactgaagaagagcaacgtgagcgtcaatcgctacgtgaacaatatttaaaaggatttcgtcaaaatatgttaaacgaacttaaaggtattaaagttgttaacgaagaaggtacagatgttacaccgacgaaattaaaagctttaaaaaagcaagataatgcaaaattaaattaaaagatgggcgaagcccatcttttttatttgtaaaaatcgttatttaataactttccagttgttattaactgttgcttctatcgttttatgttccaatatataattagcgataagttcagacatatctgtgggtatatcttttactactggtttgttttgaaacataaagaaatttcccccgccacttgcacgataattattcattacaacgtcatattcttcattcatattaagaggagcactgttatgctgtaaagattctactctttcaccaattggttttgaaatgtttaatacgtatgaaatcccttcccacatatcataattataatgttgtggctttggttctatgtaggtaggacttatggtgattgatccatctgtttttaatgtgaaataagaagcagagagttcaagagcattttttatatctgctccagttattttaattacttttaatgtgtttggataaatataattagaaacgatatcacgcattgttacatgttccgggaaacctggagatgtattatggaacaaacttgtacaagaaattgatacattagctatattcatctgtattttatttatgaattctataaaaggatgatcatgcaaacgagtttgcatagcatctgaaatttgcatgtccccttgaatgattccaataggttgatcaagccacttttgtgttttcttttcgtaatcggctaccaatgaaagtacatcttggtccgcctcaaatccttgtacagataataattcagaagaactctcttttttcacccatttatgtttcgttttttcgaatgttacttttacttttccaactgagtgtccattgcatccggtctgtaaaattgttacaccgttagccattgtgtgagaaatttcccggtgttggtggcctgttaataagatatctatgccttcaatttcatggcacattgcatatccttggttttctcctgttaacacttcagtcggtaccccggtttgtaaatctcgttcaactcccccgtgatacgctacgactagtaaatctggtttctcatgttcgcgaatataagaaacccattcttttgtagtctttaatgcatcttcaaatagtaaatctttaatgtgatgggactgttcccaatttggtatgtaatgtgttgttaccccatgcccatcaacttaaggatagaaactctacggttttccattaattgaaatgaacaaacttttaaacagtataatttctagctagctttttagaaagaataacgttttttgacacttgggggtagtgcaaattcttaagttgatgggcatgtgctacaatcccaaagaatacttcttttaaaagaaattattttattattaatccgacatttggagagaaacttcttggtatattcccttatcttgcagttgcagtcttaattggctttactttgaaagagcaaacttcttcagctacattaattacgggaaattgtattgcttttgtatttgtactgattcgtcatacaatcgtacgaatgcaaaacaaagagttaactaaaacattaaaagtgtttaataatcaattagaacaaacagtatctcaaagaacaagggatttaataaataaatctaatgatttagtaaaaaatcaagagagatttaagtcattatatgagtatcatccggatcctattttaacgattgattcaaacggtatcgtattaaatataaaccaggctggaagtatgttattaggaaaagaaagtgctgtattgatagggaaagagtgcttctctatttttttagatgaagataaatctgaattggaagcagctataaagaaagggaaacgatgtagttcatcttcactacagttacgtgtgaaaaataacaatgagaaagatatactcttttggtatgtcactatagttcctattatgatagaaggacaaacctttgggagctatgtaatggtaaaagacataacaaggatgaaacaacaacaggaagagataaattaccttgcattccatgatacggtgacggagattggaaatcgtatattcttccaacaagaattagatagatctattaagcgtgcacaaaaaacacaggataagtttgggctcctgtatattgatttaaatcgctttaagactattaatgatacattgggtcattcgattggtgacaaggttttaaaagaagttgccaaacgttttaggacatgtctgtcaccgactattcctctagcaagaataggtggtgatgagtttgcgatcattgtccataaccaaacagagcaacagctattggatttgtgtaaaactctatttcgtataactgaagaaccatttgtagtaaatcagcatagtttttacttatctcttagtataggaatagcagtgtatccatttggaggaataaatactactacacttttacaacacgctgatatcgctatgtatagcgcaaaggaaaaaggtaacaatgctgtttgtatgtatgacgagacattatctcaaaaagtaactcgtcgattacgattagaacaggatttaccaaatgcaattgaaaataatgagttgtttttattgtatcaaccacaaattgatagtaaggcaggtaaggttattggtgcagaggctttaatacgttggcaacatccagagcttggactgatttctccttttgagtttatacctatcgcagaagaaacggcgcagattatttcaattgggaagtggacgttacagaaagcgtgtcaacaactgaaagaatggcattctgcgggcttttcaaatctaaagatggggataaatttatcagctatagagtttgaacagaaagattttgttcaaaccattatatctaccatagaagagataggagtacctgctaattcgattgatttggaattaacagagcgaatagcaatggtagatgaaaaggaaaccttatcgaagttaaaagcattaaaatcatatggtgtacatttatcaattgacgattttggtacaggttattcttcattagcgtatctgcctctttatccaattgatactttgaaaattccaagagaatttgttaataggattggaacttctactgatggagatgaaattatacaaaccattatttcacttgctcatactttaaacatgaaagtgatagcagaaggggtagaaacgaaggaacaattaacagtgttacaacgtaatgcatgttatctaattcagggctattactacagtaaacctgtaaatgaagatgaatttattggttttttaagtacaatacaaaatgaataagtgaaaaatcagtatatgtatgaaataaagtgaaaagacgatctatccatatggatttgaacgtcttttcactttattttcagtagttatgcagcaaggtttcagcctttgaaagtaaaataagtatctatattccttgtatttagggctaatgggatatgaggtgaaagttgcttcttgtgaaaccgcattagggacagctcgtatattcttaaagcaatttgaaaaagcggaagaacatttcaatcgttccattgaccttttgcaaaaacataatgaagaaaaattgattttaatagtaaggcataatctaggactattatatgcaactcaaaatttatctaaattagcaattcgtcatttatcagaagtcacagagaagaatattgcccattttaaagcagtgttcttacaagcgcgtgaacactataagctaagaaaaacaaatattgtaaaagaacttattgaaaaaggattagcagtttgtatggaattaggaaatgaagagtatgtatatcatttcaatattttacgttctcttaatgaagatgaagcaattaaactcttagaagaagtgaaaaaagtatttcttacttcgaaaagcaaggtttatgggatttcgtagaagaatatgcagatctaaaaaaggaagaaattatacaataatcacatgctatcatttttaatagctaattaacaaaaggactccaattatggagtccctttgttaatgggataatgctttagtttatctaattataacaatatttgtaaaaagtgtaaaggggtcctagtttggagggggaattatttaatcttttttatttaataaagggatgatatttagttatctgcgcttcttaattatgttttttatcacaatttgaagtaaatttcagttaatcttatttattttataggaattataagttatactaaaagtaggtgcaaaatgtaccatttgaaaaagagtgcattgcaaaaaggaatccgtaaaggattccttttttgtttcttttaaaatgaagcaacgttctaattatctctttctttttttatgaatgaactaccaatgtataaatttaaaaggtatttttggaaaattgccatattcctgtaacaaaacaaaggtatgttatgtgtgttaaatataaagagaaagaaggaaaagttgtgaaaaaagttttgccaattgttgcgttattaggcatgatgagttttggagtacaggaaatgaatgtaagagctgatacataccacaagggcgattcaaaaattagtttttgggattcgaaaagaaagggtactaatttcatgaatagtacgtcattacctgaaaactataaaagtgcaaaagaagctaatattgaatatgtacgtttagcacctgataaatgggtaaaagataaagattttctatttgaggataaaccagatacttctggaaaggattttctgataggtaatgcagataactatcggggattagtaaaggaagatctagaaaaattaaaggcggatttagatgccgcacaatcacaaggaatgaaagtcgttcttacaatgttatccttacctggtgatcgatggcgccaatttaataataataagaatgacgacagaatatgggaagaagagaagtatcaagaacaagcaagtcaattttggaaggacctcgctctggaactaaaagatcaccccgcggtggttggttataatattataaatgaaccacatccagaaacagctaaaaataatagatataatgatttttggacggaagattacgagaaatggtatgcaaaagtggagggaacgacagcggatttaaacagattttatgaaaaggtgattaactccattcgtgaagtagaccaagaaacaccggttattttagattcaggtttatatgctactccatgggcctttaaatacttaaagccagtaaaggataaaaaaacgctttacgcatttcatatgtatgaaccatatgaattaacgagtcaaggtgaaaagaaaaataaagaatatcaatatccaggattagtaaaagtaggagacttagagaaacctgtaatgtggaataagcagggattagagaaatttttgaagccaattcaacaatggtctaagaaaaatcatgtaccatctaatcgaattattgcagaggagtttggaattaaccgtactgttccaggtgctacccaatacatgcaagatcttatttctatctttaaccaaaaaggatggcataaatcattctatgcattccgtgaagacacatggacagggatgaattatgaattgggaacagaaaaaataaaatgggatgaagagggtaaaccgatgcgtcaagataattcactctgggatgtaataaaaaaagatttacaaacgcgtaaatagtttagaatattaggcttaaggactaaatgtaagcatctaattcaaatagaattagatgctttttatttcgaaaaaagatggagttgaattaaagattccatcttttcttttgcataaagagtaccaatcaggtttatttacaacgaaaaataagatttttagagaatagcttagaaaaaaattgtggaggttcaaacaaatgtggtcacaattgtttaaacctttaaagtaaaaaaaatttatgaatttttcgtgagatcccaacctttaaatgttgtaatttatttacttatttctccaattggatatatttctctaattggatggaagtttagaatacagaatcaaaacataataggctgttatcgatgagtttatcgtaaagttgttatttaatgtgtcatcaaataacatttatatacaataatacataaagaaaaggagatatttatgaaaaaatatagagtaatagacacaatttaaatagtatgaatagtttagattgtaaaaacatggagaagaaaacaaaaaaacttaagagtactaaggaaaaatgagggagataatatggggaataattcaaaacataaaactagaaaaatacttgcggccactgctacagtaactatgcttgcgactggaatgattttttcatcggatgtctttgcggagcaaaaggagcagcaaaaaaatttatcgacatcattgcaaaaagaaaagtcagttaaatcagaaaatagaacatttacagtcccaggaaaaggggatgttgaggtactgaaacaacaggaaagaaaaagtatggcatttagtccatatgaaccaactggtttatatgcaaagccaaatgaacaaataacgattaatgtagaaggtaatcaagatattcaggtatatattggaacttattcgtatgatgcttcttggagagaagattctaagataaaatcatttacattaaaacctggtataaacacaatccaatctccaagtggggggatgatttatttttataataaacaacaagggggtaccattcgaacaacaatcacaacaggtggaacgactacgcctttctttgaactaggaaagcatacgaaacaagatttaataaacatgctggaccaatatcctaatgcacatgcagtggagttaaaaggagaacgtgtattaattacggccagccttgcacgtgttaagaaatatttgttgggttctaatacagatcctgtacaactcttaaaaaagatggatgaagctactcgaattcaagacaaagtagctggattatccgaagaacaagtagataaacattatgttcattacgtagaagaaaatcattctcccgattattatatgtatgcaacttcttatcgaacagcatatgtaggagatgcaatccaatacgtgttagatattaataaatttataacagatggttggggcccttggcatgaggcaggacatttgagacaacaatcgccctggaagttttataatatgacagaagtacaaaataatatatacagcctttctgtagaaaaagcatttaatcaaccatccaacttagagaaaagtggaatttatccaaaagcatttcaatatctagaacaagtgaataaaaattatgatgaaattagcgatgtttttgtaaagcttgttatgctttggcaactacagttagcgtatggagaggatttctatcctaaattgcatcaattgtatagagacatgccttcaggtgaacttccacaaactgatgataataaaaaacaattatttatgatttcagcatcaaaagtagccaaacaaaatttgattcctttctttgagaagtggggattacgtccaaataacgataccattcaaaaagtagctgcattaggatatccaattttaacagcagagatttggaagagtacggattctaatccaattaaaccagatatgcctaatgtaaataatattttagaaggaaaccagtttgcatggtcgctgaaagggattagtgatttcgagtttgctaaaattaatttcaataaatcgacagaagaaatgcaagtagacttaaaagcaggcgtaccgcatcattattttaatgaaacatatgcgagtattaaagtacaaaatgcatcagggaaagtagtatacaataaagacatttatggaaataaacaacaaaatgctgaatcgcaaaaagtttcagtcaaagtaggagattatattgagttaacacatctagaaggtgtgcatagagctactctcacaaatgtagataatagtaaacaagagagctttggaaaaaaagccatgtacgaagttacaaaggaaggtctgaagaaagtaaatcaaattgttaatccgaaaccagatacagaagctcccacacagccacaaggattatatgcaagcaaccttacttctaacagtgtagagctaaaatggaatccttctacagataatgtaggtgtaaaagaatatcaggtattacgcgatggacaattgattcaaacggtacaaggaacgacgtttactgatcaaaacttaacagttaataaggaatataaatatgcagtgaaggctgtagatgcagctggaaatacatcaatccaaagtgaaattcttcttgtaaaaaccaaagatcaaaatgtatcttatgaaaaatgggatccaaagaaggcatatacaaagggggataaagtagaacatcaagggacagtgtatgaagctgttcaaaatcatcaaggaaatggtgacccgaattggatatttgcactatcgttatggaaagcaattacaatcaattaatatgtaagaatcagatgtaaagatagaacaacatccagtattttaaagaattactggatgttgtttgaattttgatagatttctctactacgttagtattcaataataaaaattagaaaaggatgtagattagtgattagtcagaaaacaaagcaaagatttaataaagttattataattaccgcagcatgtagcatgttttctatgtttggaacgtctattttgcacactaaagctgcaacacattcagctgctccagcagtttatgtgagtccccaaaatatacctgcctcagatattattagtatagactggtcaccagttcagacaccaccttatacgtactgggctgtacacaactggaatgcaggtggtgaagctggaggatatgctggttttcaacaacaaagtgggtttgatgaaaatggaaaacgtactttacattttgccttatgggatccaatttcctctaaagaagcaataaaggccgaatacttatctccgaattcgcaagctggaccctttggaggagaaggaacaggaatgaaggttcaaacaacttatggttggaaagactacaattggtacacaatgacaatgcgttcatggcaagaaaatggtcatactaaatttggacaatggatgaaagatgtaacaaagaataaatggcatcaaattgcaattatggactttccggttgctaatgttgcatttaatcatggtttaggaatgtttcaagaagactgggctgatagtggacagaatgttcgagaagcgcgcttgaaaaatggttatagccgaaaattagttgataaacaatggagttcttggaataatcaaagtatttctggaacgcatgataatacttatcaatatgatggaggatctacttcagaatatgtatgggtcaaagcaggaggtaatacgcagtctactattggggcaggaaaaatattcacgctaaatcaacctactcaacctgaaataggaaaattagattttgatatccaatctatatattatgaaaatgaaaaattaaatgtatcttggaaactaaaagaaaatagtacaccgcaatttaaggggaaaattgaaatttataacaatgaaaatatgacgggccaacctattaacgtaattaatgatattaaatcttatcaaaatggaatcagtcaatctatatcattaccaacaaatgcttatgcaaaaattgtattaacggatatatttgatcaaactgttgagaaaaaggtacaaatcaaaaatgaatctccaaacatttttgaaggtaatgaatttgcatggtcgctgaaagggattggagattttgaatttgcgaaagtaaatttaaataaatcaacagaagaaatgcaaattgatctaaaagcaggtgtaccacatgactactttgatagtacatatgcaagtattaaagtgcaaaacacatcaggtaaagtggtctataacaaagagatttatggaaacaaacagcaaaatgctgaatcgcagaaagttccagtcaaagtaggcgattatatagagttaacacatctagaaggtgtacatagagctactcttacaaatgtagataatagtaaacaagagagctttggaaaaaaagccctatacgaagttacaaaggaaggcctgaagaaaatagaaaaaatgccagaagcaacaattttagaaggaaacaagtttgcatggtcattaaaaggatatagtgatagagaaattgcaaaagtagattatgataaaacggtagaagagatgaaggtaaaactagaagcaggtgtaccacattcctattttgctagtacgtatgctagtattaaggtccagaattcttctggtaacgttctgtacaataaggaaatcgtgggaaataaacaacaaaatgctgaaagccaaactgtgcccgtcaaggtaggggattacattgaatttacccatatagaaggagaagcaacaaaggaaaaaacgcgagcaactttaattaaccttgaaaataacaaaaatgaaaccattggaaaaacagcaagatatcaagttacaaaagaaggcttgaagaaagtagaaaaaatgccagaaacaacggttttagatggaaatcattttaggtggtctttaaagggatataataatcgagaaatcgcgaaaatagaatataacaaagcaacagaaaaaatgcagcttaaattagaagcgggtataccccatccttattttactaatacgtatgcaagcattaaagtccagaatttatccggtaatattttgtacaataaagaaattataggaaatagacaacaagatgctgagagccaaaccgtttcagtcaaagtaggagattgtattgagtttactcatatagagggagaagcacaaacggaaaagacacgcgccacacttactaatcttgagaatagtaaacaggagtatatgggaaagaaaagaatatatcaggttacctctatgggattattaataaagtcatagatttcactacaaaagttaaattatagatatatatattatataaaaatcttaaccattatacgcattaaaaaattctcaagagaatatagattggcggggatagtatgaacatattcaaagggtttctaatttcatcaattgcaatgaccacatttgtaggaacagatttaatcctacaaaatgatagtattcataataaagtttacgctgaatctaataatgtcacatacaaagaaagagattcacaggaagaaagattaattgtaaagtttaaaaatcaaattgacttaccttatgaagatggtattgagaaacgaataaaaaatggggattatgataacaatttaaagcagttattttccgaaaatacaaaacttactttgaatcgtctgttctcatctgtaaatccgatagagattgaaaagttatcagtacaatctaaatcagttgctaatgaatcagctaataatttattaaattattatattgtacaagctcctaataacatagaaatagaattattactgaaaaaatttgaaacatctcctctcgtagaggaggcttatatacaagaaaaacaaattttgacccctcctgaaatacagttaccaaatttatctgttaatccgtacgatgaccctagatttaaaaatcaaggatatcttgaagcggcaccaaagggaattaatgcctcgcatgcttggagcattaaaggtggtgatgggaaggatacaacttttgtggatatggaatatggatggttattgaaccatgaggatttagtcaataaaaatattaagcttatgtcgggacaaaatataagccagcatagagctcatggtacttctgtattaggaattgtttcatctgaagataatcaaattggaaatattggaattgcaccaaaagcaaatgtaaaagtaatatcccagattagggataatggaatttataatacagcggatgctattttaagtgctgtacataatttacaagcgggagatattcttttattagaggcacaagcttcgtatgatgggtatggggataaatatttacctgtagaagtacatccagatatttttgatgcaattcgtgttggtacagataaagggattattattatagaagctggcgcaaatggttcaaacgacttagataattttaaagatcgtaatggaaaaaagattttaaatcgaaatagtccagacttcaaggattcaggtgctattatggttggggcgggatcatcaactgttccacatcaacgtttatggttttcaaattatggaagtcgattagatgtatatggatggggagaaaatgttgatacaacatcagcaaatccaagtcaaaatactacaaatttatatacatcaacatttagtggaacatcaagtgcttcaccaattattgctggagcagcaacttcgattcaaggtattgctaaagaacatcgaggttctccttatacaccagccgaattaagaaatatcttaagtaatccgaatacaggaacaaaatctcaagatccgtggaatgatagaataggtgttttacctgatctaaaatctatattagataacttaggttttaattcagatatcccgaactcttctagtattttagaaggaaaccagtttgcatggtcactaaaaggaattagtgatttcgagtttgcaaaaattaatttcaataagtcgacagaagaaatgcaaatcgacttaaaagcaggcgtaccgcatcattattttaatcagacatatgcgagtattaaagtacaaaatgcaacagggaaagtagtatacaataaagacatttatggaaacaaacaacaaaatgctgaatcgcaaaaagttccagttaaagtaggagattatattgagttgacacacctagaaggtgtgcatagagctactttaataaatgtagacagcagtaaacaagaaagttttggaaaaaaagtcatgtacgaagttacaaaagaaggcttgaagaaagtagaaaaaatgccagaaacaacggttttagatggaaatcattttaggtggtctttaaaaggatatagtgatagagaaatcgcaaaagttgattataataggacaacagagaaaatgcaggtgaatttagaagcaggcgtaccacattcttactttaatcagacatatgcaagtattacagtaaagaattcaaccggtaatgttgtgtataataaggaaatagtgggaaacagacaacaaactgctgaaatccaaacggtgtccttaaaagcgggggattacattgagtttacccatatagaaggggaagcagtaaaggaaaagacacgtgctacacttcttaaccttgagaataataaacaagaatatataggcaaaaaaagaacctatcaagttacttcaacgggattaaacaaaatagattaacatgaagaaccttctaattattcgttagatgcaaatagtcgttcattatgaacggctatttggtttttatttaaagaaaagtgaaatgaaaatactctctcttttgtatatactctccttgctatcaactgctatatttgtttatcaggggggattttaaaaatgtgcttgagaattgataaatgtttaagtgctatagatttgagaaaaaagaaacagaatagtaaggtatttattgataaaacccctcttccgttacaatattttacatatttggtatgatgtatatgagttctatgcatattaagggaggaatgggaatgaagaggttcataacacgtgcaagtggtaatacaatctcaaaaaagttagttttaatgatgttgccgatggttttaatgatattgatgattacaccatcgaatgatgtatcggcagcaaatctatcaagagcaggttcactaaaaggcgtgaatttatttaatggaagttggacagttgctatacaggcagcaaatttacaatatgtttctgctgagccatcgggtaatgtagtagcaaatcgtaatgcagttaatgaatgggagaaatttgaattaattccgactggggaattatatacgtttgctttaaaagcaaaaagtaatggaaagtacgtttcgtttgagccaaacggtagagtagtagcagatcgtacatcaattggggcatgggaaaaatttatcttatataatggtggagacaataggatatatgtattacaagcactaagtaatggtaggtttatatcagcaaatggtggtagagaattaactgctaatagttatgtagctggaagttgggaaagatttgttattgtatacttctaaactttgaagtgttatatatctaaataataatggcatgtttagtttgtataaacgcctaatacaagaaagtattaagtatttaatacaagtgtatattaacatgtaaaagggctgcaagtaattagcagtccttttgcatgttaaataaggacttactgaggttataatgaaaagaaaaagaaccctatagggttctttttcaaggcatattaacagtaaggagaatcatgaaatgctacttcaaatctttattaggggaaagattttgaataagcttaacatacatctatttttacataaatgtaagatatagtaaattgataatgtttatacttattattgctaatattcaattaagatagttaatactatttatatagtgttaactggtgtatagtacagtatagatttagaaatttaatattagattacatttgttaaaaaagttaatagatatattttttcaaattctaactaacatttaaacggttttaattgaaattggttgtgtattaacctttataagccaataaaataaacaaagaccctgtaataaatacagggccggatacagggttaagggaacgcatagtttcttaatatcattatactgtttaaaagtttgttcatttcaattaatggaaaaccgtagagtttctatccttaagttgatgggcatggggcatggccatcaactaataaaataataaaattaaaacacccttgcttgcagtaataaagtgaaagggtgttttaatttacgtctacaaacgagaaaaagcagttaaaataaagtaataaggtttacttcaggaaaataaggtatattatatttgttgagtagattctctttagagacaagaaaagtaggtgaacaaagtgggaaaatatcaattggattccaaaagtcaggtagctgtggcaaagttccatgaaaaacagaagcctgccaaatttgataaaaagcagcaacttgaaaaattgcgtacggagtatttgaaaaagaagcaaaaacaaacagataaataatatgttttattttccgaattttttctgtatgtaacgcaaacaaacacaagaaaataggtaagttattcatcattcaaatatatacaggctattttttcaaacctcttacttatgcaactaacgcatgcgtcagttcattaagaataactaaaaaagtcgattccttgagatgaaaaagagtaaacagtgcccttatcaggcactgttttattttgccattataatttcctccactgatttaggtaagcgatacaagctattccccacctccaaaagaatgaatcaagttcctcaccgcatatattaaactataccttttcttaaggagggctaccttaatgcgtactcctttatcctttgataaagaaactgccatactgttagcttcttgttgtgagttaacgtatgaacaatataaacaaaatggtattttcgaaataccagatggttttcaatatgtacaaggttttcaaggaaaggccattcaaacaacagaatggttcggatttatattagaatctgaggatacaattatcgttgccttcagaggcactcaaacagatccagattggattattgattctctcgtcaatcaaaaaccttatccttatgctttaaatggcggaaatgtccataacggttttctctctatttatgagtcttgtcgtgattctattatggatatgctcgtatcattgccagcacataaaaaactgctagctactgggcatagtctaggtggcgcgcttgccacattacacatattagatgcacgtataaatactgccttcgcacagtatggactttatacattcgcttctccaaaagtaggagatatcgcttttcgaaattattataaactacaagtagctagtagctttcgtttcgtcaacttattcgatgtcgtcccacttctccctccccgaaacataaattttaatgatcatgattgggagtatgcacacgtccatcacaacatgacatttacaaaaaacacaaaatccattacaaataatcattccattacaacatacaaaacatgtctgacttctcatttttaaccagtaaacaattggaaataaaatattcgtatactataataatctatgaagttatttttggatgaggggaccttacatgttaaaatttatcttcgcatttttccttattgtaatttttacggttacaggtttctttacattttcatactttgcgacaggagagtatgatggggcaggtatcatatataccactgttccatttctttcttaagcaaaataaataaaacgagcttaattttattaagcacgttttatttattaatatccatttctgttggtaaatcgataatatatctcccaatatagcaacctctttaaaactgtttaactgcattaccaataccccaaatttcattactgtactgcaaaatcgttcgatcgctcgcaaaatgaccagactgtgcaatatttaaaatcgacatttctagccacttcgttcggttctcataagctctaccgacagcttcttgtctttcagcatatggaccaaaatctcgcagaacgaaatattcatcattttgaataacgagagaatcgtaaattgcttcaaattcggctcccgactgtgcaaagaaaccattcgttaactgatctactacctttttaatgtgcccattgtggtgataataatcacttgcacgatatccaccattttgatagtaatgaagaacctcttcggctgttaaaccgaaaatgaaacagttatcatcaccgacccggtcttttatttcaacgttagcaccgtctagcgttccgagtgtaatcgcaccattcatcataaatttcatattacctgttcccgatgcttctttactcgccgttgaaatttgttcacttacatccgctgccgggaatatatcttctgctaaagaaactcgatagttttctagaaagataactttcatatattgactgacatacgggtcattatttacttttcttgcgagttcatttattaatttaataatttttttcgcgtaataatagccaggtgatgctttcgctccaaaaataaaagtacgcggataaaatgtaaaactagcatcctctttcaaacggttatacaaatataaaatatgaagaacatttaataattgtcgtttgtaagcatgtaatcttttcacttgcacatcaaaaatagaatttggatcaatggtaatccccattgtattatgaatacgctccgctaaaatctctttacgctcttgttttacctctgcaaatttctcttggaaactcgcatcatattgaactaattgtagctcttgaagcttaatcggttctttcttccactctgttccaatcgcctctgaaatgagatttgttaactgtggatttgctttcataagccagcgcctatgagcaattccattcgtcttattattaaacttatctggataaaattcataaaacaatcgcatttcccgctgctttaatatttccgtatgaattttcgctacaccgtttacgctatggctaccgacaatcgctaaatgagccattttcacaaggtcatgtgcaataatcgccattgcttcaatacgatcccactcatacggatactgttcccacagttcatgacagaaacgttcattaatctcttcaataatcatataaattctcggtaataacggtttaaaaatgtgaattggccacttttcgagcgcttctgataacgtcgtatgattcgtataagaaatcgtctgcgtcgttatgtgccaagcttcttcccatgctaacttttcttcgtctagtaaaatacgcatcagttccggaattgctaaaaccggatgtgtatcgttaatgtggatcgcaattttttcatgtagttgacgaaggtcaccatatctttctctatgcattcgaacgatattttgcaaacttgctgatacgaggaaatactgttgttttaaacgaagtatttttccctcatcatgcgtatcatctggatataaaaactccgatacagcctctgtttcacgcttatatttcaaaatatctttgcagttttgcgggaaaggaactggttcagcattccaaagtctaagtgtatttacagtactcgtctcatagccaactaccggcacatcatatggcacggccataatgacttctgcatttgtatgcctaaactctaaacgcccgtcaatttctagcggttcaacattgccgaaataacttacttctacagcttgatcatgccttcttacttcccatacgttttcatgaagaagccactgttctggaaattcgacttgataaccatcaacaattttctgatcaaacaaaccatgtttataacgaattccacagccgtgtcctggcaagtttaaagatgcaagtgaatcgagaaaacaggctgctaagcgtccaagcccaccattaccaaggcctgcatctgcttccacttcttctaactcttgtaacgaaatccctagttcagataacccttgctcgcatacatctctaatacctaaattcaagatgttacttccaagcaaacgtccaagcaaaaactcaatagacaagtaatacatttgcttttgctctccggatcgataactctcattcgttgcaatccattgactattcatatactcacgtaccatatggccgagtgtattatattgatcacgagttgtagaatctttaaaacttttaccatacatcgtctctaacttttctagaaaagttgatttaaaactttcaacatgagtaaacattttttcaccacctacatgttattccatgagacttttatacaattccttataagcaagagccgattgctcccagctataatcttcagtcatcgcttgttttacaagctgctcccataccggtttatcgtgatagaattcaattgcacgatgaatcgtatgcagcatgtcatgtgcattaaaattcgtgaaactaaaaccatttccttctccagtttcttcatcataagaatgtaccgtatcgtttaatccacctgtttctcttacaattggaatcgtaccgtatgctaatgcgataagttgtccaagtccacacggttcaaacagcgatggcattaagaataaatcacttcctgcatacacttgatgagctaattcttcattaaatccgatataaacttttaccttctccggatactcatatgccatccattcaaagaattgctcatattccgaatcacctgatcctaaaataatacattgtacatcttcttccattatttcgcggaatacagtacgtactaaatcaagacctttttgcttcgttaatctcgttaccattgaaataattggtgtatcctctttttctggcaaaccaaaataacgctgcaaggcgcgtttattttcactcttttcatataatgactctgcatcatactgagccttaatatacgaatccgtttctggattatatacgctcgtatcaataccatttacaatgccgctaagcttatcattatattttcgcagtaatccatctaacttctcaccgaaaaattcatattgaatttcttctttatatgtcgggctcaccgctgtaatttgatccgaagcgataataccgcccttcataaagttcacattcccataaaactctaactgctcactgtggaaatattcatcaccaagttctaacaagtcgtacattacttcaggaggaaatacaccttggaactgtaagttatgaattgtatataccgttttaatacgctcatataacgggttatcttgatacttttcacgaagtaagaaattaaccatagccgtatgccaatcgtggctatgaagaacatccacttcaaaatcaaggtgcggaatacactctaacaccgcttttgagaaataagaaaaacgctctccgtcatcataatgaccatacagagaatctctcttaaaataatattcattatctattaagtaatacgtaattccgtcttgctcaccttttaaaattccacaatattgatttctccacccaagcgggacgttaattactttatgtaacgtacatccatctcttaacttttgcggaatgaggctataattcggaagtataatacgaacgtccactcctaattttttcagctcttttgggagcgcacccgctacatcagctaatcctcccgatttcacaaacggtacacattctgatactgcaaataaaatattcacttgttgtcccactgcgcgaaaagtttttattactcctcttgcagcttcctcccttcgagttttcatttgaattaaaactttaatcagtggaggaaaaagcccccactgattcttttaagaataactattaatcgtactgttttgtacgcttcctttttctacaacatacggcccatcggcgtttccttttaatacgacaccgtcaccaattttcacatctttatcaataataacaccatctattatacagttatctccaatttggctcttttgcataataatactgttacgaataattgaaccttttccaattttaactgaacgagaaacaacactgttttcgacttccccttcaataatactaccgtttgcaatcattgtatttttcacgactgcaccctttaaataacgagttggtggctcatcttttactttcgtaaagatcggtgcttctttcttaaataattgcttccaaatagcaggttgcaaaatttctaagctatgtttatagtaactttcaatcgagtcaataattgctacatatccagtatgttcatatgtagcaatgtgtaatgatttcccgcgcttttctctcactacatcaaataaactgtattgttccagatctttatatgactcaaataagtctaacaataattgtttctttaacacatatgtttgaagtgaaaccccttcatggcaaacttccgtaatatcagctgccgtatgtatatgtcgctctaacaccgcttgaaaatttaatgctgttacgagatggctattcgtaataacaacgtactcttctctgcttcttagaaaataatcaatatgtcttctaaagtgtgcaaaagacccaaattcatcttggtcacattggcagtttggcgggaataaaaatagtccgtctcgttttctatctaaatcccactgttttcctgaaccaacatggtccattaacgaacgatttttatggcttgtaaaaactgccacactatgaatactagaattcaccatatttgaaagcatgaaatcaatgagtcgataacggcccccaaacggtaacgccgctagtgaacgatgccctgttactttctttaaggaaggaaaacttcccgttgcattaataattcctaacattttttctcccattcatttcatcccccttttctatttcccttcagcaattaatactacatcgtcaacattcttttctggacgaatgattgttccatcctcgataaccatttctgatccaacaatcgctctttcaatcacaacatttttaccaatcttagcccctggcataacgacagaatcaatcaccatacttccttcttccaccgtcactccttggaataacacagaatgcttcacgtccccttcaatgacgcacccttcgttaataagcgattcttctactttcgccttttcagcaatatattgaggcggttcgtttggattgacagagtaaatacgccaattacgatcgtttaaattcagtgatgtttcatcgcgaagcaaatccatattcgcttcccataagctcttcaccgttccaacatctttccaatatccttcaaacggatacgccattagcttcttcccttcatccaataaaaggggaagtacgtcttttccaaaatcgttactagattcagggtttcttgcatccatctctaaatactctttcaaaattgaccaattaaaaatatagattcccattgatgcaagattacttcttggaaattgtggtttctcttcaaactcaacaatctccatttcttcatttgtattcataatgccaaagcgactcgcttcatcccaaggtacttcaataacagaaatggatacgtccgattctttctgaatatggtaatctagcatcttactgtaatccattttataaatatggtcgcctgataaaatgagaacatactccggttcatactgacttaaatagtttaagttttgataaatggcacttgccgtacctgtataccacttaacccctgaagactccgcataaggaggtaagactgtgaccccaccgtttactcggtctaaatcccacgcatttccgattccgatataattatgaagttcgagtggttgatattgcgttaaaatcccaaccgtttcaataccagaattcgcacagttacttagcgtaaaatcaataatgcgatatttaccaccaaatggaacagctggcttggctaaattctttgttaatgcacttaaacgactaccttttccccctgctagtaacattgctacgcacttttgtttttgagccatcttgttttttgctcccctttctcgtcttcactggtcgtaatatggatacgccaaatggtggaattgtaatctctacatgtgctgcttgattatggtacggttctagaatcgtcttaagacgtttcttattcacttgtcccgaaccgccatattgctgtgcatcactgtttaaaatctcgttataatactcgaaatctggtacacctactttatagttttcatatgtagctttcgtaaaattacatacgataactaacgcatcttcttgtttatccccttggcggataaacgagaaaatactttgctcgttattattagcatcaatccactgaaaaccttcaggcgaatgatcaagctgccaaagtggttttgagcgcttatacaatgctatgagctctttaaagtaatcatgcatataacgatgcatttcaaaatcatgtaaattccaatctaaatcttcaaggtctttccactcatcaaactgcccgaattctcctcccatgaaaagtaatttctttcctgggtgagtaaagaaatatccatataataaacgaagctgagcaaacttatcccagtaatcacctggcattttatttaataacgactttttcccatgaacgacttcatcatgagaaaggggtaatatgaagttttcagagtaagcatatagtaaagagaacgtcattttctcatgaatatattttctgtactctggcgcacactccatatatttcagcacgtcattcatccagcccatattccatttgtaattgaatccaagcccaccttcatacgttggtgctgttacaagtggccaagctgttgaatcctctgccgtcataagaaaatcttcatcctctgcaaacactgcttcatttaactcccttaaaaatgacacagcgtactcattactttgctcttgtccttctttattccagtacaacatgttcgcaactgcatctactctgaaaccatcaatatggaaatatctcatccaaaataacgcatttgaaattaagaaattacgtacctctctctttcctaaatcaaaattgacagttccccatactagattttcttgtacatctttatctttatattcataggtcggtgtgccatcaaacaaatataaaccgtgagcatctttacaaaaatgccccggtacccaatctaaaatgacaccgattccatatttatgacattcgtcgacaaaatacattaaatcatgcggtgtaccaaatctactcgtcgctgcataatatcccgttccttgatatccccaagaacgatcatatggatgctcaacaagcggcataatttcaatatgtgtaaattgatgttccaccacatacggaatgagttcttctgccatttccctgtaagaatatagtgttccatcttctttctttttccaagaaccaaaatgtaattcataaactgtcatcgcttctttataaatcggttttttctttttcttacgattccagtttttatcattccattcatatccttttatatcaaaaactacagatgccgtattcggtcttacttctgcatatatagcatacggatctgcctttaaaatgacgtcaccagccaacgtttcaatcgcatatttatatatttctccttcttcaatatgcggtataaataaggaccaaatcccttcttctgtcacttgtagcatcttatgttgctcataatcccactcattaaaatctccaacaacactcattgctttcgcatgaggagcccagactgtaaatcgtaccccttgaatctcatcttccgtcacaacatgtgcgccaaagatgttataactttcatagtacttttctgtatgaaactcatctcgtttcacttcttcacaatttattacactcaatatgttcacctcacttagatgacagaattttttatactttaactatttctgcgaaaaactgcaatatccttgttaatttataaaaaacattcgtttttttcttaaaaatgttagtttttcttcacatttccgtgtaaaatatcgaattttgacgaatattcattgaaaacgctttattattcttctatatttttaccaattattttttctcaacctttattttattatgtttatcctatttttcatgctattttccactcaaaatcaaaacaaaataatctgtcataaaaaaatgtttctcaatattttttgtcacaatgttattgaaatgcgaaatttaatcctgcttttgaaaagctactttccgaaaaaggagtaactgcaaaagtaaatgaaccgaaattagaggcaggttctgttacagttggcggcgctatcgatgacaaaaactttgctggattagatggtgatttcccgttcattgatgtaactttcaaagtagaaaatgatgaattttatgaagcaaacgctcaattagagtcaccaatttttgtttactggaaacaaggtgaatcagaaccaaatagaatgcgtgtacttcaagatcaaacattctcagttatgtccttaaactcactagtagaaggaaatattaaacctggtgcgttcttaaatgaacgcgaatatttagatgaaaagttcgattatacaaagcttggcgtaaaagtatatgcgactgattcttaccgtcataagtttgaaggctcactagataaatacggatacttcaaactaaatggacttccagttaataaacgcgactataacttatatgtagaggtgacaggacatttaacaaaccgcctaacaacgaaacttggtactgaaaaagacggtaagctgcttggccaatattattatgcaagacctgacgaaaaccttgccggcgatgtaaatgctgataaagtaatcgatattaaagatgctgaaattatcgctagcaactatggtaaaaaaggactaactgtaaaagacggagaccttaataaagatggtattgtcgacgaaaaagatattcgcttcgttgaaaggaacttcttgaaaaaaggtccagatgcatctaaatcacaaacacctgtagaaaaatccaaaagcggtacactggcagatattttaaagaaattaggattaacacctaaaaaataataaaatgaaactttaatcagtgggtttttactgcccggcaaatagcggaataataaagagcactctacgtaaaatagagtgctcttttctataaacgacccttatccagcaaaaggggtatattggggatatacaagggaaaccggaaaaggaatttatattaaattatataagttcagaggtaagaagcagtttcccacctctgaattatttagcaattattatagtactggtgccattgtttcttttaatacttttacagaatgagcgaacttcactttttcctcttcatttagctcaagttctacgatttcacgtacaccttcgcggttaattacagctggaacacctacgtaagcatctttctcgccgtattgaccttcaaggtatgcagatacagttaatacgctgttctcgttgtttaagattgctttagttacacgaagtagtgacataccgattccgtagtaagttgcacctttacgctcgatgatatggtaagctgcatcacgtacgttttcgaagattttgtctaagtcttcttgtttgtactgttcgttgttagctaagattgtttctaatttttgtacaccgatagtagcgtggctccatactggaagttcagtgtcaccgtgttcaccaacgatgtaagcatgaacgttacgtggatctacatctaagtagtcacctaacatgtaacggaaacgagcagagtctaaagtagtaccagaaccgattacgcgctctttcggtaaaccagattctttccaagttacgtaagttaaaatatcaactggattagttgcgattaagaagattccatcgaatccgctatccataatgacgcgaacgatttgtttaaagatctttgtatttttctcaactaagtctaaacgagtttcacctggcttttgtggtaacccagcagtgataacaactaaatctgcatctttacaatctgcatagctaccgctccaaacttttgttggtgatggagagaatggtaccgcatggcttaagtccattgcttccccttctgcttttgcttcattaacatctactaatacgaattcttcagctacaccttggttaatcattgagtaagcgtaactacaacctacagctcctgttcctactaatactacacgattgataccttttttcatggtaatttcccctctctattgttcacatatatttttttatgattgtttaagtaattaattaaaatactaatttaatgttgtttaacttctttacattcatattgtagcacgtattattgtgaattacttcacaaattatgacctatttgtgaactttttcacatagagtgtaaagttattggaataggtgtggaatccatttcaatggaggcgttttctttagattgtgaaagggtttttcttgtggttttcatcggtaagtgaaattatatcggcgatttttagaatatatcgaccgtaactccaaatatatcagcgattattaaaatttatcgatcgtaactcaaattatatcagcgatttttgcaatatatcgatttaccgacaaaactcgacaatactgacaacataaaaaagctgtcttcagtagatcacacctgttgagagaaagcagcttcttctatatattatttattttcatccgtttctccaagtgtaggaggctacagccatacagctggggtaaaagttcaacttgaggtatcattttagatagataattccttcatatccatacaggtccaaataaataacatgattgtatttaccgctctatatacccaactgcaacagcccatacttcatatttcttctatgcataaaaaagcagactatccaaagttcacttttatacaacaaaaaagagatagcagattatgctatctcttttagtatgacccgtacgggattcgaacccgtgttaccgccgtgaaagggcggtgtcttaaccacttgaccaacgggccagttctggcagagaagaagggattcgaaccctcgcaccgcgttcgcgatctactcccttagcaggggagccccttgagccacttgggtacttctctataaatatggctccgcaggtaggactcgaacctacgaccgatcggttaacagccgatagctctaccactgagctactgcggaacaattatggtgggcctaaatggactcgaaccatcgacctcacgcttatcaggcgtgcgctctaaccagctgagctataggcccataattaaaaagcgggtgaagagaatcgaactctcgaccagagcttggaaggctcttgttttaccactaaactacacccgcattaaattgtaaatggtgagccatgaaggactcgaaccttcgaccctctgattaaaagtcagatgctctaccaactgagctaatggctcattttgaaagtggtgccgactagaggacttgaacccccaacctactgattacaagtcagttgctctaccaattgagctaagtcggctagttattgttgcttaagataaatttcagcaacactctcacttcacgtctaaacgcttatagagaaacgtgtcgcgcctgaagcctgcatcgggtcatttcctgctccacctgattcctgcatcatttgggcagccaaaataccaacatattgagcaacaccatgtttttctgccatttctttaatctttggaagatatcctgtaacttttgcattaagattgacaggctccccgccaggactcacattacctacacacataccaccaacaaaattactagaaggtgctagatgtccatacataccttctaacatcccggcttctaatatctcacgcgcacgttctttttgacttttactaaactttgcgagttccatagctttctctagtccatgagaagatgttgtcacttttttgcttccacttgcattaatctcatctatttttttcttaaaatctgtatctcctactatcttttttacatctggtccggagtaactttcagattttgttttttgcatctcttttttctttttttcacaaggaccattcggtcccgcctcacatacctctttttctgtatattcttcatattggatatccaataaatatgatatagcatcatgcggatctttaccagttaaatcattatcatatcgtgccatgtcaaaggcgacgacctctttccaatccacattcaaagccattgagacttccatatatttttttacttgttcctctgtcttaccttcatcatcagtaaaaggtacaaaagagactaaaatcacacacacagcaataattactcccataaccaaagcggcaggtactccaaccgctgccacaacagcacccacaatttttaatatacctgcttttagcattttggcagcagctttcgctgccgcccttcctgcttttcctgccaattttgccattttcccgcgcgcttgcatcccttttttcttaataaagtgggaagctacatcttttaaaggattactttttttctgttcatttggatcgttaggattttgactcatagacttatcacaccatattttccattttgagaatttcttcctcttcgctgtgctaagcgagggtttggcgcaaatggaatcagattttgtgggtcatgttctgataaattcaaatgcgtctctgtacggactacttcgtcctgtgtttgtgttactaagatttcttctcttggtttaatactactgtctttcacttcacaagctctttcaatcctttggtttgcttgtaaacgcgtatctccttttccgaatggcgaaatacgtgacactgtaccgtctgttgttgtcgcaaccatgtaactacgatctctttctaccaccatttgtacattcttatagccaccttggtctaaatcagacatatagaagtgaccattgtctaccttgtgattgactgtaagtggtggttcattaaataccggtttctgttgtaaaggtctttgattttggtttcctactaattgatttggatttacattgattgagcgattaatattgattttgccaccacttgaatcttgtatataggctggagatgctttcgtaccattacgatactgcgttaattgtccgtctgaaatatttaaatcctgatataccacttgtccagagcgtatattactatctccactaccataacgagatacaacttgcttcattccactagcgtcttttgcttcaatccatgatttattatttgtcgtcacaagacgtactgcaccttttacaaccgattgcgcgcctgtatgatctgttgttgttggtaccattctctgaatctcctgaatctcttttgcttctgtacgaactgcactgttatacggattatgtttacttaccatacgtgcagttgcttgataagcacccgcaccaccaatcacacctgcggcgtaacttaagccttttgtcacattatagtggcgctctgctgcattcccacctaatgatgtattaacagcagcagtagtcccacttatcactctttgtactgcattccctccggattgttgaacagcactcgcggcactaaagtatgcatttgataccgtatcaatgcgatccgcaagcataaggtgtttcgcaccttccattacactcatgccaagttttgtactctgctgtgtcatacgtcccactgcagatgttgggatagacattttaccagcactttgtgcaatatttgctacacttgttgatgcatctgcataagagcgttcaatttccgcaacggaaagatctcctgcacgtgcgatactggcttgcgttcgtgtcgctgcatatactgctttattgattgcgctacttgttgcaacgccatgtgaacgaacaccttgaatcgcactagtaattccagaacctacttgttgactcaccgttccaagacttgcatggctttgtaatcctttcgttaattgcgaagcaaaggcatctttattaatatacgattgattatgtagactcttaccactcgtatcttttgcctgtacgggcatcgctcctgcttgtactgccgcttgttgtgcgactgctttaaattcatttcctttttcattcaggtgtgactgccacgcttctaatttttgctttggatacatagttggagacaagtttttcataaagcttgccttgttctcagctgcatatccttgtttaaaggattctgtagaagcttgtaccaggttcccaacattacttacttgttttgcttgctgacctcctgttccatttgtcaaaccgtgcgttttcacaccgttgactgcctgctgaatgcctgccgcactggatatacccatcgcatttaagtcaggatctttttgtaactgttgtgataaatgagaagcgaaagcttctttattcgcatagtttgtaccatctttttgctgtacaataccagctgattccgccgcttgttgtgcatgattttgaaatccttgtactttttgacctaaatgtttattccatgcggcttctttttcttgctgcggcatatctgcagggaattgtttcatgaatcccgccttatggtctgcactatatgctttcttaaatgcagcagtagaagcaccgacaagagcaccgacttgtcccatattttgatggccactttctaacgtttctccttttacatcctcgactgcttttccgacttttcctaatgcaagccgagaagcaaacgcatctttattcacataggacttatcaaacagattgtttccttgtttgtccttcgcatcaactggcatggctcctgcttttgttgccgcctgttctgcgtggtttctaaatccttgtacttttgtgttcaaatggtcgttccaatgtttctctttctcttccgctgacatattttctggtaactgactcataaacgtatctttatggtctgcctcataccccttttggaatgcattcgttgcagcgttaactaaatctctagcatttccatatggtgtagcggttttctttatattttgtaaatcttgtttccgctgatttgagaaacgagacatttgatcaccatttgttttcgctacttttttagcaatctctgcatcggacgcaccagggaatgcttgttttaagcgactcgcaactgcagaatcaggattatccgctttccaattttcaaaatcttttgtagctaaatcctgtgcgatatcttcatcggttagttccggatacgattcgccatttagatttgaatacgtgtccgcacccttctttatactcgaaccaatatgttttcctaaggctacagccccttcgccgactgcagcaacacttctaccagccactgcaccaggagcactacctaatgcacttccaacttgcgagcctgctaccatcgctcccggtccaagaccagctcccgctgccatacctgcaagtcctgtcgctgctttaccaattgaacttccaatttgacctgcttttaacatacgagctgcacgagatgttgtaccaacatctgtccctaaatttgctcctaatgcatttttcgggttatccgcatcttctttattatctttctctccatctttcttttctttccctttatcttttgcactacggtagtcgtcacgaacacctttaaccaaaccagccacacttgctaaagcacccatacccatcatcgtacccgctctatgaataccagcggatgcattggtgctaaggccaataaaacttttcacaatttcaccaactgggataaacatggcaagcaatactaattttatgataggattttgtgcacctccaataagtgtaatgactaaccatagggtaattgcgtgaatcgcttgaattaatactgctcccataaactcacgaatccaatataacgtctgttgtttcttttgcgggaacaaccacattcctaccattacagggcctagtaacattaatacgtatagtgtcacagcacgcattaaataataaaagtttgcccatatcattaatccagcttcaataaatagtccgaatatgataaacatataatcatttttatggccttccattgaaagttctgtaatcgtcttattgtcagacagtccagactttaataaaggtatttgttgatccgggttgaaattcccgttatttactccatttatcgcctctttaaattccaatgtaatccaagaatttagatcaaatacaaaattataaaagaaatctaaatgccagaggcaaatcgagataatcattaagtcttttgcatattcaattaatgccgtgcgattatttggattcatagtcgttgctgaatattttgctgctgtaatcactacactgacgaggacacaaaaagcaacaaatttaaacatgacaggcataccagtatctaatacattcgtaactgcattctttgcatataaaaaatctagattagatttatctccaccaaagactagaactggaatagtatccataaatccataaataggcgctagtagggcctttaccatatggataacaaggccaccgacccaatctattattttctcaagcataatttcaccttcctttacaaaggtacgctactatcctgcgtacccttgtactttcttcatattgtttagaagctcttgaagtaccgcttcattcgattcaataaacatcatttctttatctgatggatctgtttgaatccaaaccgaactatctcctacacggaaaatcccttctccttttcctggattgttgagaataatatcaagctccccagcagttaagttaaagttctcttgaatttttttcttatcaatcttattttgttctaagaagaaataagagaaagtagattgcaagataccacgagcttttacattttctaagatacgaacaaagtcctgacttgcccaacacataccggcatttcttttacgtgaacgacgtgctactttttctaagaagttaaccgtttgttcataatcgataaactgccacatctcatccacatacagtacttttcgtttgatagcatgttctggactcttaatccaatgctcccaaatatagttcaagataacgtggaaagcgattggttttaaaaatccttcctctaaatggctaatgttgaaattaacaacgcgtgattcatttaactgtgtttctacaccacgaccaaaatgactttgtccatcaaataatggttttgaaccatcacgtaagaacggacgaatcgcggcgattaactcttctgccttcacatcatctccatgattttctactatgacatcgtagatttcttttaactctggctctggctttcttacttgagactgaattaattgtccatccaccttcttcacttcatctgtatataaagaagaaggatgtgaagtaataccatgtttatcaaacacttcacggattgcatcttctagcattgtacgttggaatacatttaatcctggttgatcaaaatcttgtccgcgtataataatgtcaaagaatccgagtatttcattgattttctctagaatcggtacaaatcttacatacttcacgccatcacgctctacgagttctttcttatcgtattgttccagcgcttctagttcttcatctttatctgtaatttgcagttctgttacagcgattgcacaagggttaataatgatattactttctggtgaaatgtttaaattaataccacctaaacgttttgtaatttttacgaattcaccttctggatcgataatcattgcatgtgtatctgcaagtgacgtttcacgagctagcttcatttttaaaagtaaacttttcccggaacctgaaattcctgtcacaccaatgttatagtttggtggacgataatctgcattcccgaatgaatttaaaaattctacttggccagtaattttgttctttcctattggtatcccaccgttaaatcttccggatcctgatacaaagggtgcaaatgtacatagagcacgtctatcgatatttcgataagtatcttgcagcgtatttggtgcacctaatggcataaccgctttcaaaccacttttcacacggttccaagtactcgctatcttaaagtgagatgcttgcatttcatcttcaagatattcacataaaacgtctaattctttctttgattctgcatacgcaacagccatcgtactcaccatataagagtcgttttcattgaactggatttcatccattaaattgtttgtatcttgaatttttgcatctaagtctttttcttggtcaatgtttcctcgtgtacgttggaaagaaagattggaacgtaacattgtcagctgcatatctaatgatcgcattgctttagcttttggctctttatgaatatcgatcatgacatccacttctccagccgaagttaacatgttgagccaattggtttgcatcatacgtgggtacccatcacgtggaatataaaacggacggaagaacgtattgcttcctaaagattgtttaataactccataatcttctgcatcaattttcataccttctggagcaataacatcaaacactgttgtttgattgtctaattgcgtcggtacttcttcttccagctcttcctcctctagctccaattcatccttctcttcggcttctacttttttcttttcttttttcttttcctttttcttttttccgaataacttcatatttacgccaccccattatttgatttttctgctttttcttctgctagcactttcttcattaactctagttttctttcatttgtttcccctgttgaatagagcgagaaattctcgttttcaattaaatcctggaaacgagcttttacggctttccgacggttaaatgctacgtataaaagttctattaatttatctttcgttaacatttctacattaatttttgctttcgatagtagatttcgggatgcattataacgacgatatagttcgttaaatgccttatctacaatcttttcttctaattcgtcctctgtatcagccgtaatcgtactaatatcaaccttatatggataaattaaataacgtttttgttcatatcgaggttgtgaacgctgccagtactctaagttatcgataacttcttgtccatatagaaccgtctctggtgtaaggtccttcgcacctttcatcgtttctgtcatttttcgtacaggatctgttaaatctacgaacttactttgaatatatactttcgtattaaactctaatgtggttaaccatgattcaattttgatatcaatcgcttcttgttccatattggaaagtaagtaatagttaaccggatgtgcttccgcaattaggacaaatgtgtcatcatgatatcgaatcatgtgattatcaatttccttaatgtcttctacaaaatcccgaaagaaatcaacattatcctcatcaatttccgattcagcaggtgtattctttttgtttttctttccagatttttcagcagtatgtttctctactccaccttgctttttcccctttttcttagaaccaaacagcggttttccattcattttccgataaaagaaaaaccctacaatggctatcgccgcaaaatatatcatttccaacatttataaattctcctttgcccatgtagttggctcgtacccttttctccactttcctttttcggagcggctacgcattttgataagtaaaaatctatcaagatacatgtgttgtttttctttataaataaaaccaaacgctattacacctactaccgttggtagtgctaaaattaggcaaataaaaaacgctactaccgcatcaataggtgcaaacaactgccataaaaatggtacatataaataaagggccgccccgccacctaataaataaatcaattggcgcttacttaatacacctaacagcgttttttgttccgaagtcatatcaacaggaacagttacttttctcattttgtttcctcccttgtataagagaagctctccccaaatggaggagagcttgtacaaactcttttattagattgttgtaacccaagcagcaatgtcgtacgctttgatcatgacaaagcctccaattgccgcgcaagctaaaccaatcatagcttgtgtacggttttcagggttctttccttgtgcaccagatagtttaatagctgcgaatacaacgcaagctgccacccaaattcccccaaaaccaattaaagttttcactaatgtgttcatgcttttttggacagtttcagcattggcaccactgccactaccaccaagacctttcgtaaagctactttttgccagtaagaaatctcctactgatgttgtcataagttttgcagacaaccaattcaacataattcctgcacctccggatgtttttgctcgcaaaacgcaaaaagaccccaatacacgcacacgtcccctaaggacatggcgcatattgaggtcttctcttatatgcgaactgattaattttatattttattgtaaaatcttattacgtttatattatagcaatacgattttaaaaatacaaccccttatttacacctttattactttttatgctctttgttaggatcgtaccataccatttgaatttgaaaaatatcactgtccgtaagacctaaaactttcatttcttcattcaatgagcacgatggttctatttttatagattttgtacttttgtctctaagtgtatacacatgtacataataaccttcttttttattttgcataataacatacctcttaacgtccttaaatatataaaaattacatattaagtatataattattctttctcttcaaaaaatgaatctaatgcatctaacgaaacaacttttatttttttcgcttttcttaacgctgcctctctaggggtaattataatttcattactatttaaaatagattgcaacacatcgtatattttatgtatttcactttcatttaccttgtctatcatttcatgtagcatatccctggttaccttcatatttatttcctcttccctcgtatatattctcttaatttcattatagcgtattgaatttttgatcccacatcgttttttctgaatggtacaatgtagaaaaaggaggcttattcatgggtgacttaattggcgatatatttgggggaatccttatgtccattccttcaaaaaaagaaaaaatgattcgtaaaaactttaagttattgaaaaatgaaacgtggtttaaagagattgaacaaagatacggtagattaatgttatttaaccattccattagagaatttgttaaaaaagaggatcttgaggcaatcttaaaggatgttaagaagactaatgaatttcgttatgaattagagggaatcctaaagcaagaaaaaatatagttgtaatcacaaaatgggcatcaatcaaaaataataaaaaaataggtaattgtttgtaatcacaattacctatttaatattatttatatttactctttattttttaaaatttcattaacctcttccacacttaattcagtggcttccgctactttctcaataggtataccgacattaattaaattgtgaatcatctctatcttagttgcaattctagtctcttctgtggcttttttggtagctatttctgcggcctttttcgcagctttttcttctgccgtttctatttctgatattctatcttttattgctttttctctagcctcatataagcgtaaaaaatccttatcgctacttaaacgctcccaatcctctattgcctttttcaaaactggatctttttccattgctatcgcctccaggattgttgttaatctctcatcctcatgcgcaggaaataataataaccaacgcgctaaagagtcttcccatggattcattcgttctccttgccattcttgaattacttttggaatttcaagaaaatgcaactgcatattttctgtaatgatacgcttagattttttgttcatcactgtattaacattatgaaactcttgctcttctggaaatagtatgaaatctactatattaatacaaatggttggtcttaattccgtgtacttcatcccttgagtcatttgggaataatacatgcctgaccaatagaacaaagagcgctctatcatatcttttttgtctcgaacttgaatctctatatttaattttataccattattcagagtagctcgcaaatctaaaatagataatttatcacccttctgctctcttggaagatgcggatcatctaagtgcaaagatgtaatttcttcatcaatagatgattgtagtaccgcattcagaaaccctattaatatatcttcatttccttctactccaaacaagcgcttgaaagcaaaatcaactcgtaaattcactagtttttttttcatagatgtattcatattctcttctacccttcttttagttaattggatataagaaaaagatagaattaaaaactctatctttttcaatctacctatttatgaaaatatcaacctactttataactttcacaatctctgaaatacaggtttaaatcccgcttgcattgtatcatccagccccttaccttgcgttgggttccatgcagctatgattacgttatagcccaatcgctttaactctgtcgcaaagtctataagagctttccttactttttgattctctactaaatcggcatcaaacgctaaatagacattttctacacccatatcctttaatacaggcatagtaattcgccaagcgtttacaccaggaatcgcaagaaccgtcgttcctacttcaataagttctgctttattaaatcgctttggaatcaaatcagcaatcaaatcagctttcatgggtccttctgtgatcattactgatttagtttgatgcaatgtaccagaattccaatgttttaaatgagaactcggtaccgctacatgtacaggaagtggattttcactaccacctgcaccagtcccctgatttttgtttgctgatgagagccacagatacttttgccctttatgtatctttacaacaatttgtccctcttgaaatggtatctctagctttttgctcacttctagttcgccttcaaagatacaatcaccatttttagttatctttacaacattaggctgttcgattaattccgcttgaactccattgggtgccgatttcacatgaacggagtttttcacttcatccacacgaacctgccatccaacaatttgattgtactggtttcgaaaagggatcaatataccaggagatcctgacatcaaacgaagagaaagttgacccttcctcatctcataaaagcccggaaccccctgccaacagtttttattccccatctgtttaaaatgctgttcccaaacagtcgtatacgtattatccttctctaacacaatttgttgttttaagaaagatcgatattgacgtacttgtatttgttcctcgctcatttttctatctcgtaataaatgtgtatgatgatgctcctgcaatggtatgaaatccattaatttccgattaaacacatctaattcctcattgcttttcttatcatgaatctgaacttcatccgcctcaggcaatcgatacttatcttttccatttatgtagtgaatgtagcttgggttgcccgtgttttttccgtaaatccatttactttctacacgtgtacatgctaccttctcttgcgaaacatgcagcatgcaattacctgtatcatgacaaatcggacacgtaacacggtaaaattcccaccagctacctcttggataagcactcgttaaacgaaattgacctttttgaatgttataattcattattccccactccttgtatactgttaattatatatggaacagctacttccattaaactctttatacttctattcagatattctctttgttctcctaacggatatacaaaagaatatgtatcacaaactaaataatcgtttctatgttcttgatctagcaaagctgattctacatacgattcaaatgctctagcaaacatctcatgattcgtagaccaatactttttggttctcttcttatctaactgaatggctgtatcaaagtatacagaccctttcgcttgataagatatttcattaagtttctcgcctgtttttttatagtgataagcagccaacatttgtgcggttttctcaaattctttttcaactttacgttccatacgcgtcttagctgcccctgataaggtatccagctttctgtacgaacttaagtgataggattctagaatacctgacacattccccttatatacatcataactattaatgacgctaccatagaaataccactttctagcatgggcattttccacattaattactctggccacttttccttgtttacaagcatctagcacagcttgcatcctatctttgataatagcaggcaaaatatttccgatactcttcccacttgataggaaagcaaggctaccatttttaaaatcatgactacaatcatataagaaatgatccagtgatgtgtagcatcctcctgcgattagcaagagggtagctactgcccatttcgggtacgataggtaagaatttgatgcattttagcaaagaaaatgattgattttgtacatgcttaaacaagcgaaaatgtacatgtttatcttgacatttacatcattatggtacaaccgtgtatacatttaccaaacaaactacatagtttaaattagtaaaatatattgagaggaaggaaataaatctatgaaagtcataattttgtgtggcggaaaagggcttcggatgcaaggaattttagaggacattcccaaaccattagttcgagttcaaggaaagcctctcctcttgcatataatgaattggtatagaaaatatggacattctgatttcattttgcccttaggatataaaggtgagaaaattaaggaatattttatggactttagctggaaagagaatgactttagtttgaattttaaaaccagtcaatatacgctacttcagaaattagaaaattggaatatacactttatagatacaggaattgatacaatgaccggggcaagactaaaaaaacttgaatcctttgtacagggtgaaacctttttattaacttatggtgacggattagccaatatagatattgatcaactaatagcattccataaagaaaaaggaaaaattgctacattaactggaattaaaaaaaatagtcaatacggcctattggcggtcgaagatggaattgctattgattttaaagaaaaaccattacttgatgaagtaattaatggcggtttttttgtatttaacaaagaaatattcgattatttaagtaataatgatgattgtgttctagaagaagatcctcttcgaaatttaataaaagacaatgagctcgcagtctatgaacacaatgacttttgggctagtgtcgatacacctaaagatttaaaaactgtaaatgaaagttggaatccaaataaattttagtggagaggactgaataagcattgaactctaatgataaaaaaataagtttacctcgattgtatatcccctctaatgagaaaatagttaacccactttcaacaggaattaaagcttcaaatctctccaaaaaaaatactcaaaaaagaattgatccccaattctataatcaacaacatgatctaaataatcatttctgcgtcattgtaggtagtgagtatgtcttgaaaattattgctttacagcaatcattaatgcagtactcagaaaaattcacattgtggatttgttgtatagatccttttgcatattcactattaaaagaaatgagtttaattaatgtaaaccttttacaagttgaagaattggaagatcgtgaactaaaagcaattaagagaaaaagaaaagtaaatgaatattgttggactttaaaatctgtcttgatagaatatttattggtcaattatgatttaccatctattctatattgtgatggtgatttatgctttttctctgaccctaatattatttttgaggaatggggtgaccattctattttcctaaccccccaaagagatcgtgattgggtagaaaaaatgtatggaaaatatcaggctggtctaattggatttaagaatgatctctatggactaaaaagtgtaagatggtggaaaaataaatgtatagattggtgcagtgccgaggctgaggaggggaaatttggagaccaaaagtatttagattatatccctatatattttccaaaagtaaaaatttcaaataacttaggtataaatgctgcaccttggaactgtatatataataacgattataaaattgacaagactaaaaacgatatatttattgaaaacgacaaactagttgtttaccattttgcatgtattactatctttactgaaaatgattttgatctttggtctttgggagaaatttcaatacccaataatatattaaaccatatttacactccgtatttagagagaattcaatttgttttaaagcaattaaaggataaattcaataaagatactaaacaatttttaagtaaaaaagatataaataaagctcaaactttatataaagattcacaattaagaagaaaaatgaatcaatccaatcattttatgaacttttccatgattataagtaaagaacgattaattcaaggattgacctcttattattccttagaaaatttcaacgctaaatttactgtatggatctgttgtatggatgatttaacttatcaaatattagaaaaattaaaattaaagcacgccatactaattccggtacaagaaattgaaaatcatgaactcctcagtataaaaaatgatagaagtttacaagagtattgttggacattaaaagcgcccctatgtctacatgtccttagtctttatccggaagttgatcacattatatattgtgatgctgatatgtatttctttacagcacctaatatcattcttgatgaatggtggaagtactctgtattcctttgccctcaaagaagctctactgaaattgaaagcatacacggtatataccaagctggtttagtaggcttcaagaacgatcaaaatagtaaagaaattttaacatggtggaaagataaatgcctagaatattgcaataatcaatatgatgttgaaatgaatagatggggtgaccaaaaatatttaaatcacattcctaacatcttttctaatataaaaatcatgactcataaaggtattgatgcagcaccttggaatgtcattttaaatagcagttctatatccaaaacagataataaagtttttattgatcaagatgaattaatagcttttcattttggaagtatgcaaattattaatccaaatgagttcgatttatggaaacaagaaactttagaattacctccagcagttttagattatatatacattccttatattgaacaattgaacaagacatgtcatacccttcataatacttttcaaaaatctccctcctctttatttgctgaccaaattgatacaacaacaataaaaaattattttaaatacccctccactcatcacaattaagactgatactttccttatttaaaaataaatctatttatttcagcaactaaaaatacatcttaataaaggatagattatcactatgattgcttcatttaaaaataaaactttccttattactggtggatacggttttattggttctcacttggcacgaagacttttaaatttacaagcaaaaattgttcttttcataagaacaccatcaaactcttggagactaaaggatattctaaaatatattgaaacctatgaagtagatatacgagataaaaaacaagtacaagatgcaataaagaaaattaatcccgattatatctttcatctggcagcctatggtgtaaattctgcccatacagattacatccatgctatagaaacaaatgttatagggacttgtaacattattcaagcagcaaaattggtgaattgtaaaaaaatcatcaattttgggagtagttctgaatacggtaacaagatggaacctattcatgaaaatatgttactaactcctgtggacatctatggaagtaccaaagctgctgctactatactcgcccatcaaattgctagcgaaaacaatattaatcttataacattaagaccttttggcatattcggagaaggcgaagagccgcataaaatttttagctatataatcttgcgagtattacaaaacaaagatgtaaatttaactttatgtaatcaattaagagattattgttatatagaaaatgtaatagatgcctgtatcctagccgtagaaaatactactgtacaaaatgaaatctttaatattgggagcggcactattcaccccttgaaacattatgtagaattattattcaaacatttgaaaaccaattccagaccaaattacggtgcaatttcctctagaacaaatgaaagatgggttcctgaagcggatgtgcaaaaaataaaaaactctcttttctgggaacctagaattaatattgaagaaggaattataaaaactgttaattggtataaaaataataaacatttatacctaaccccctaaaaatagggtactaaaggaggtggactaattgttaaaccaaaactttaataatgctttttacggaaaaagaattttaattactggacatactggttttaaaggttcttggttatccctatggttgaatgaattaggtgctactgtaatcggatattcattagattctaaaaataaaaatgataactttaacattactaaccttcaaaataatataattgatattcgtggagacattagagattttaataaattaaataacgtttttacagattataaacctgaaattgtattccatttagctgcccaacctctagttaagtattcatatgaatatcctagagaaacatacgaggtaaacgttgtaggaactatgaatgtactagaggcaattcgattacatgaatcagctaaaataggaattatggtgacaagtgacaagtgctatgaaaataaagaatggccttggggttatcgtgaaattgaccctatgggcggccatgacatatatagctcaagcaaaggatgctgcgaacttttaatttcttcctatcgtaattcttacttttcagaagaaaaattttctcaacataagaaaataattgcaagtgttcgagctggtaatgtaattggtggtggtgattggtcaatagatagaattattcccgattgtatacgagcattagaatcaaacaaaaagattattattagaaatcctactgctattagaccctggcaacatgtactagaacctttaagcggttatttactccttacagaaaaaattataaataatggtatccttttttcaggagcatggaacttcgggccatccctaagcaatattgtttcagtagaaaaattagtgacaagtttactagatatttggggctgcggggattggacagcagaaaatataggtccaataaattttcatgaagcaaatttactaaaccttgacattagcaaagcaaaattcaatcttaattggcagccaaaatggtccctacaacagactttagaaaatacaatagaatggtataaacattataattcttacaccagttctgagatgagaaatctatgtattagccaaatcaaacaatattgcatgctttgaactactcccacttacccatacttgctgtgagttccttatggagggagtcttcttggttaaaataataaaagatacattaatttttatagtctaaattataaacctactatacctaaaattatgtgattgtccattaacaaaaattttatttcttcggttatttcaaatcaactattgacattatattgaagaataaaggaatcacgtatttttctagtgattcccttgttctgagaaaataatgtcttgctttaacgacaatacagtatatgtgattattaatttatttgttctagttatgaaaaaatctattcctgtcaaaagagctttcttcaaagaaaaacttcctttttttttttacttatcctactcgaaaagtaaataatgttatttttcagataattatatctactatttatagaattacactgagctttaacaagtttatgcttatatattgattctcttatttattatcaccaatgttgatgaatttatgcatagcttattctatacacaaatagctttttgaattatcttttcagaataaataaaggagactttctcttttatgcactttccccttaccagtcttaaatttccctttaatcaacaataagaacaaatcttcaatatagtacatcttctataaaataaaaccatacgtaagataattttactattacaaataatgacatagtctgtttcaccttttacattatctaaaaaagaacttgtaggaattcttacaagttcttttttatttcctttattctcttcttatttacatacgcaagatttatacatttggtggtgatacatactatatttatccgataaaataatctaaaaattaatacataattgatcgttttaagaaaaagaaatttcataaatcttcaatcacagttcttagttcacctaatagaacgtataaagactcatatcatcttttgattatttttggatgttttattctacgtatattcgacacaaattgattgttttttatgaattttcttgaaaaatattgtaatatcactccattttttcttctattttgttatgatgtttataattaaattggattaggatttttttagaaaatgggggcgtatattatgagtgtctcagtaaaaggaaatgagcaattaacctctctattgaacgactggtatcgatctatgctatctcagcaagttataaaagctactaatctaaaaaagaaaattgatgaaaaaattaataagttaagcattgaaccgaatcaagagcatcaggatcaaaatttgttactatactattcactactcgaatttcgttacaaggtcttaacagatagccttggtattcaacaaaatagttttgatactattagcgattatgatatgcctacagatcaatttctacaattctattatcattttttcaaatccattcattccacttttatatcaaattatactgaggcagaggaacattataaactagcagaaaaaatattggtagctataccagatgaaattgaacacgccgaattttactatagaattgctactttctatcaccatacctataacaatctcgcttctatcgaatacgcaaataaatcgagagcaatcttttcaaagtacgaaggttatgaagtaaaaacagccttttgtaatagtttgctaggtggttgctgcatctatttaaaacagtacgaacaagcagaagaatatctacattgtgcaattgatttactacaaaaaaatagggaagaagattccttgttatacgtaaaaaatactatggggtggctgtattctgatcaaagtatgtctactttagctattcgtcacctttcagaagtaacagagaaaatccctacacacttcaaggccatcttcctacaagctaaggaacattataagttaggagaacaatcaacggccagccaactcattgataagggactacagatttgcagagagattcataacgaagaatatacacaccacttctctattttaaaaaaattaaacgaaaatattccattggaagaattagaaaaaatcattcaagaaggaatcttatactttgaggaagaagaattatgggaatatgttgtcgaatacgccgaattatttgccacaaaatgtagacaattagagaaccaccaaaaagtaagtgactatttccatatttgttatcaagcaagacaaaaatcaatcgcaaaaggagtgttaaaataatgaaaaaaattagcttattattatcaagcattgcttttattggggtattaacggtgggaatttttcagttttctaaaacagatcagcttgctactcatgggcattatcctgctccttcatatagtgttggcgattatggtggtgcaccaccacaaatttaatgtaaatgtatttaaaaaccctccaaatggagggtttttaaatggcttatctgcctgttcaatacgcatagagagtacatattatacttatttactatgttataagatttttcatttccactctgtaacaagattctagcattctctcctagaatctcaacttaaatcttaaatccaccaattaactcttgaagttcttccgccatctgtgctaattgtattgctgaagaatttatctcttccatagaagcatgttgttcctcagatgaaccagctatcgtttgcatacttgaagaattttcttttacagccatagctatttgatcaatcgatgtatcgactttcattgcatcagtagtcattgtattagatagttccaccataccatgcacttttgacacaatatcatttgcagattttgaaatctcataaaaactttgttttgtatcgttagcaactttaattcccgactgtacttctacgcctacttcattcatagcttttacagtctcatatacgtctgcttgtatttccttaattaaacttccaatttccattgaagattcggatgattgctccgccaactttctaacttcatcggcaacaattgcaaatcctctcccctgttccccagctctagctgcttcaatcgctgcatttaatgctaataaatttgtttgttccgcaatattttgaatcgcttctaatatactgccaatttgctgtgatttcttatctaataattttatgacattatcggattgagaaacagagtgatggatagactgcatttgtgttacagtttgttctactaattgttcaccttcattggctttttgtttagtgtatatggatgaagccgatacttcagaagcattctcagctacgtattgaatatttcgtgttacctcaccaattaattcagctccagactcaacttcattattttgaacctctgcactgttcgagatttcttccatctcttttgtaatttgttctgtcgcaacacttgcttgctctacactagcagttagttcctcagaagacgcagctacatgtcctgcagatgtgttaatttgagaaataatattacgtaacgactctgccattgtattgaaactaccacctaattgaccaagttcatcctttgaacgaatatctattttctcggttaaatctccttgactaattctttgagctgaaatgactaattgtcttagtggagtaattatagatttgagtatgaatagaattacaattccacctaacaataatgaagcacctattatagtgagcgttttataaaaaataggattggtagcttcttcaatttctttcgtaggcattacgccagctattttccaacctgtttttttatttgtcttaaagcttatgtttcgatcttcaccattgaggctataagtaattactccatcttctgtcttgtacaattcatccactaaagttttatctaatttctctccaggttttagtgatggatgaacaactatagttttatcttgactaactatagatacaaatccttgcttcccaatttttatcattttggatgtttttacgatatctttaatattcaaatctacgccaatgacaccacttttatctgcattctgctttgcaattgcaattaccatatttcctgtagactttgatttatatggagatgaaacaataatctctccatctgcttttactgcatccttataccaactgctttctagcggattaaacccttctggtatttttccaacaggtgcatgaataaattgattgttactggatgccgtataaatcgtttctatctctggatgtaactgtatatattgatcaaatttattctgtacattttgcgattgttcaggattataatccccttgtgtgagtacctttgcaaaatgagtgatatctgtatgcttattttctaattcatcatcaacaatcttatctaaaatacttatattatcttttgctgattgtagaattgtttcattaagatctgtttttgctttattataagatgatactcctacgataaggcttggtataattaatattgctataaatgccatagacaacttcgttttaagctttattttccccaatctttcttttatattaaacactagctacttctccttttcatttttactacttatatagtttatttaaatttttctcctttacttttccacattcatttatggtaccattcgaaatgaaaccacaattacatcctattatccgtactttataatttagagatttaattttcacagacagagttttatctgccctcctttcgaatatgttatttttctagattcagcaattattagactacgaattattccaaataaacttgatgcaacatatacttcatttaaaaaataattattggatttgtttggataaaaatctagtttagcgctaatccaatcggatgaaattcttaccataatacattcactaaacataaataagtaaatttatttcttttaatacttatatttaactgccttttaaccattctaactgtattatttcatcgttttatctatttattacaaccacttttgtattattgaatcactaaactataaattctaaataggagaataaaataaattagagaattacattgtaacacatatatataagttgttaatattaaaatttaaaactttactatttttcatatgcaatattacatgcgaaaagccataatttttttgttatactatgcatgtggatttttcatccaaaatccacccaaacgcatatttatgtatatgccaccctaattgatgaaagtgagaagagtgtttatcatttttctcacttttttatttaggctctgttaatattgattattgataaaaagtattaaataagggaagacaccttagagttggtgcttcccttatttgttgattattcaaatctaaaataggtattttctaaacctattctttgctttaatgttctgcccaaagcataattatttggtaattctttttcaatgacacaaataatataacctgcttttcctgttgttaaattagttagttgtaagtagttagtgttgtcgtagatataagaaataatatattcatagaaattattttctttatcttctctattcataccaacattgtacaccctaactcttgctcctacccaaatttcctcatcatcatcaacattacttaaaggcatccatttcgagttatccaatatttcacccttttcttaattcattcgtttatacacgaatgttgctagacacaaactatcataagcatccgtcatttcattgattagacgaccaccgacagagaaaaaagactcaacatagctttttacccattgaaacacttgctcttttagttatttttacattttgaatctacgaaaatgaattcccttataaaaactctaacagagaatcttccttccaaatttcacctagggaattatttgttttccaaaaaacctaccaacatctttatcaactcattttagaatatttaaacaataattccatatacattacctgcataaattattcattttcttttatataagacctacctttttacttttgatagattattagacattggattattatacataaatcccaaaaacatgcggtattttgtagaattttgtctatcaatatgtatgtacacccttttgtagtggatatagactgtgaggtgtaaggagataccttacaaaataataaaaaggagattatagaatgagtagattaacaaaattctcaaagttagtatttgcaactttaatcgcgggaagtagtctaagcacctttgtttcgtcacacagtgtacaagctgacaccttagatcctaattaccaagacaatataaaattcataccaccttctagtgctaggccaaaattggaacaaaaaaacactattgttccagaagcaaaagttgttaaaaaccattatgtaaagtactctaaagcacatttccaaactaaagaaagtataccaaaagagatttattattcttcagaaggctttaagggctatatacaggcaagtaccgtttgggatatgggagatcatttcgcaacactatattccggaaccgttattcgatgttagacttttaatccattctcccctaatgcttaaaatggttaataactcactgccaatactgtaatatctattgttcataaaataaaccacaaaatctttcgatttcatggtttatcaaatataaagataatgctaaacgaatactctaacattaccttccccaaagttaattatagagtattttcaaaaaaaagacactcttgtagtgtcttttttatagtattttaaaaagaattccacctactaacacctttttgttgcgcctattcgtttatttcaatataatacttttccatctcgtatatgcaatagacaatgatagctaaactccaactgacactataataattatgtgtgtagaagtcatagcccgctttaatacctttctctattacaactaatgtaaatcctaaagccacccatctgttaattttcatctttataaacgttaaagagataattattaaaaataaaatatttgtaagatgatttatcattagctcatatttttgaatgtatactgccattatacaagcaacgatattagtcgcaatgccaaaggcaatcaccgctccccaaaccctgtccgaaagtcccactcctgagtcagtcccttcctaaacaaatatccctttctttaattcgttcctacaccctattcaagatatgctaaattatccttgtctgatgaatatctatttatcttttcatatagagcaaacaaaatttctacccataattttttctttattaaacaaactatgtctaagccgtttgaactagcggcttcactcttctggtaatgagatagcacaatttattgaattgactatgtctttttttagtaaataggcctttgataactaaaaattcttttgtttttcagttgacatactaccgcaggtcttttcattttgatttgttttaagtatatatctttttgattatacgaaacaatctgattacttatcaagtttattttatcgttttttaacaaaatggtgtcaatgaaaaaaagaagaaaaatatttgaattttttgtgacgaacttgtaggtttttgtatgattttgtaggttcgcttataagatgtgtgagtagcttttataaattcaaattgaaagcgttcgcatgaaggggatgaacataaatgaaaaaattcggattggcaacacaaatttttgtcgcgcttgttttagggattgtagtaggggcagtcttttatggcaataaaacggcgatttcttatatcacaccaattggggatatatttattcacttaattaagatgattgtagtaccaattgttatttcagcattaattgttgcagtagctggtgtaggagatatgaagaagcttgggaaactgggtggtaagacaattctttatttcgaaattattacgacgattgctattttaatgggattacttgcagcgaatatattccaaccaggtactggtgttgatatgagtaatttacagcaaagtgatatttcttcttataaacaaactgcagatgcaacagagaagaaaggttttgctgagacaattgttcacattgtaccgaaaaacgtatttgaatcgattgcacaaggtgacctattaccgattatattcttctcagtattattcggcttaggagttgcggcaattggggaaaaaggaaagcctgtctttaacttttttgaaggcgtactcgaagccatgttttgggttacaaatcaagttatgaaatttgcaccatttggtgtattcgcattaattgccgttacggttgcaaaatttggtgtagcaacactacttccgctaggaaaactagtgctagctgtatacgtaactgttatactattcgttgtgattgtattaggtattaatgcacgaatggttggagtaaacatttttacattaataaaaattttaaaagaagaattgattctttcatttacgacagcaagttcagaagctgttttacctaatataatgagaaaaatggaagagttcggttgtccaaaggcagttgcctctttcgtaattccgacaggttatacatttaacttgactggatcggctatttatcaagcgttagcggcattgtttgttgcacaaatgtacggtgtgcacatgtcactaacggagcaaataacgttattattcgttctcatgttaacatccaaaggtatggcgggagttccaggtgcatcgttcgttgttgtattagcaacgttaggttcaatggggttaccactagaaggtatcgcattaattgcgggaattgaccgcattttagatatgattcgctcatctgtcaatgtattaggaaatgcattagcggccattgttatgtcgaagtgggaaggcgaattcgataatgagaaagcaaaacaatatgtagaaacagtcaaagaaacaaaagcagcataagaaatcgttaaggagtgaataatcatggcaacattaactgaagttaaaaatggtgttcgaattgaaaaagattttttaggtgaaaaagaagtaccaaactatgcatactacggcgtacaaacaatgcgtgcagttgaaaacttcccaattacaggatacaaaatccatgaaggtttaattaaagcgttcgcaattgtaaaaaaagctgcagcgcttgcgaatacagatgtaggaagattggaattaaacaagggcggtgcgatcgcagaagctgctcaagaaattcttgatggaaaatggcatgatcatttcatcgtagatccaatccaaggcggagcgggtacttcaatgaacatgaatgcaaatgaagtcattgccaatcgtgctcttgaattattaggaatggaaaagggagactatcattatattagtccaaatagtcatgtaaatatggcccaatcaacaaatgatgcattcccaacggcgattcatatcgcaacgttaaatgcattagaaggcttattacaaacgatgggttatatgcatgatgtatttgaattaaaagccgaacagttcgatcatgtgattaaaatgggacgtacacatttacaagacgctgtgccaattcgccttggacaagaatttaaagcgtactcacgtgtacttgaacgtgatatgaaacgcattcagcaatcacgtcaacacttatatgaagtgaacatgggagcaactgcagttggtacaggcttaaatgcagatccagaatatattgaagcagttgtaaaacatttagctgcaattagtgaattaccgcttgttggtgcagaagatttagtagatgcgacgcaaaatacggatgcttatactgaagtatctgcagcgcttaaagtatgtatgatgaatatgtctaaaattgcgaatgaccttcgcttaatggcatcaggtccgcgtgttggtttagcggaaattatgttaccagctcgtcaaccaggttcatctattatgccagggaaagtaaaccctgttatgccagaagtaattaatcaaattgcgttccaagtaattggtaatgaccatacaatttgccttgcttcagaagcaggacaattagaattaaacgtgatggaaccagtacttgttttcaacttacttcaatcgattagcattatgaataacggtttccgtgcctttacagataattgcttaaaaggaattgaagcgaatgaagatcgcttaaaagagtatgttgagaaaagtgtaggaattattacagccgtgaaccctcatatcggttatgaagcagcagctcgcgttgcgaaagaagcaattgcaacaggccaatccgttcgagaactttgtgtgaaaaatggtgtattgtcacaagaagacttagagttaattctagatccattcgaaatgacacacccagggattgcaggagcaactcttttaaagaaaaattaaaagaagaggggggacaatcccctcttttttgtttacaatatagaaatgctatatatgaatagaggtagggatgttatgagcaagtttacagtagcttctaatggcgcattagaaacaacattaagaggagcagaagtattatcaacaccacttttaaataaaggggtagctttcacacaaaatgaaagagaagagttaggtttaaaagggttattaccgccagcggttttaacgttagaagaacaggcacgccgagcatacgaacaatttagttctcagccggatgatttattaaagaatgtatacttaactgcgttacatgatcgaaatgaagtattattttatcgtatattaacagatcatttacgtgaaatgttaccgattgtatatacaccaactgtcggtgtagcaattcaaagatatagtcatgaatatcgtaaaccacgtggtgtttatttatcaattaacgatccatcaggtatcgaagaagcattcacgaatatcggtgcaacagctgagaacattgatttagtcgttgtaacagatggagaaggcatattaggaattggtgactggggcgttggtggtattaacatcgcaatcggaaaattagctgtttacactgctgcagttggaatcgatcctagtcgtgtattaccggtaattttagatgtaggtacaaaccgtgaggagctattaaacaatccattttatattggaaatcgtcaccctcgtataacaggtaaagcttacgatgaatttattgatacgtttgtacaagcggtaaacaaacaattcccgaaagcacttttacattgggaagactttagctctcgtaacgcacgaaaaattttagataaatatcgtcatgatgtttgtacgtttaatgatgatattcaaggtacaggtgcagtttcacttgcggcagtattatcggcagtgaaagcttctggtgtaccgctaagtgaacaccgcgttgttgtatttggtgctggtacggctggaatcggtatcgcagatcaagttagagatgcgatggtccgcgtaggcgtatctgaagaagaatcatataagcgtttctggtgtattgatcgtaacgggttagttacagataatatggaagatcttcttgatttccaaattccgtacgcaagaaaagaagtagaagtaagtgggtggaagcaaaatgatgtgatcggacttgctgaagttgtgaaacatgtaaaaccgacaattttaattggtacatctactgttgcaggtgcatttaaagaagagattattaaagaaatggcttctcacgtagaaagaccaattattttaccaatgtcgaatccgacaccacttgctgaagcaaaaccagcagatttaatcgagtggacagaaggaagagcgttagttgcaacaggaagtccatttgaaccagttacatataacggtgtaacgtatgtgattggacaatcaaataatgcactgattttcccaggtcttggtcttggaacaattgtagtacgagcaagcgtcatgacggatggaatgttcgcagcagcagctgaagcagttgcaagtatggtagatacaagtcagccaggagcacctattttaccagaggtcgaagaattacgtaatatctcagaaatggttgcaattgaagtagctaaagttgcagttgcagaaggtgttgcaagagtgaacttaagtgataacgatatcaagatggcagtgaaagaagcaatgtggaagccagagtatcgccaaataaaagcggtagaaaaggttagaatatagaaaaaaagcccgtttataacaataagcgggctttcgcttttactactgaaaaaaagtataggaagtgtcacctttgaattggaatcaattatggaagaaagatatgtcccttttaattatattaatggtcgttgttccgattgctggggagctgaactttcatccctttaatgatacgtttcgagttagcttcggtacaccgctattcttctttttattattatttttaagaagagtaccagcaggagttgcaggtattcttgttggtatatctgtagtcttattccgagtatgtcttgactggatcatgcaaggttcatttcatatgacagaatcattttatttgcgttatcctgtgttcttctattattttatttatggcagttttttttcgctttgcagggtaaataagttccatcagaaaccaatcattattggatgccttgggatttcaattgaaattgttgcaagtatgtcagaacttgcgttttatcacatgttagtactaggtacaacaataacgatttctgaagtaaataaactcatcattattgctatttttcgtagtttctttgcacttggttttttaaatatgatgaatttatatgaaacgaaattaaaagaatcgcaagttcgaaaagaaaatgaaaatatgttaatgcatctttctaatttatatgtggaatctgttcatttgaaaaagacgttacaaaatgcggagttaattacacaagaagcatatcaactatatcgaaatttacaagtaagcgctgattcaagtagtaaaacagcattgaaaatagcgggggaagtgcatgaaataaaaaaggataatcaaaggatatttgcaggattatctaaactgttattagataaaaatgtggctgaatatgtagaaggacatgagttagcagaaatgattgttagaataaacgagaagtatgctgaaatgctagaaaaggatatacgtttttctaaacatatagaaggtgagcatgctgcataccacgtgtatacagttctatcaatttttaataacctcgctgcaaatgcagttgaagcaattgaagataaaggtgtcattattattaagctatataaaagagatcaacatatattttttgaagtaattgacgatggacctggtattgcacaaaaatataagaaattagtatttaagccaggatttacttctaagtatgatcaaacgggaacaccgtcaactggtattgggctttcttacataaatgaaatggtaacagagctaggcggagaagtgagattagaaggccgagaaaataaaagaggatgtaagtttatcgtttgtttaccggagggtagtttaaagcgggaaggggaatagatttgttttattatatcgtagacgatgatgaagttttccgttcgatgctttcgcaaattattgaagatggagatcttggagaagtaattggtgaggcggatgacggagcttttattgaggcggatcaactaaattttaaaaaagtagatattttatttattgatttgttgatgccgatgagggacggaattgaaacagttcgtcacattgcgtcaactttcacggggaaaatcattatgatttctcaagtggaatcgaagcagcttataggtgaggcatatacacttggtgtagaatattatattacaaaaccattaaataaaatcgaagttgtatctgttgtacgcaaagtgatggagcgtattagattggagcgttctatacacgatattcaaaaatcattgaataacgtgtttcagtgggaaaaaccgcaattgcgtactgaaccagtgcaagaaggaaaaaagataggggatttagggcgctttttactatcagaactcggtattgcgggagagaatggaagtaaagatttacttagtatgctggaatatttatatggtcaagaaaaggcacagacatttgagtttggctttcctgcgttaaaagaaattttccatcatattacgataagaaaattaggggatttagctttagaggcggatattgataaagagaaaaaagcgtctgaacaaagagtacgtcgagctatttatcagtcgttaaatcatttggcttctttaggattaacagacttttcaaatccaaaatttgaaagctatgctccaaaatttttcgattttaccgtagttagaaaacggatgacagaaatgacgaaagatgaactcgcatcttctggtcatacgcgaattaatacgaaaaagtttattcaagtgttgtattttgaggcgaagaggttgatggagatagagtgaagaagatgcttataaataagcatcttcttttgttaaatcaacattttatattttctcgtggagcatgtaaaatgttaagtaagagaaaatggttttatattaaggaagtgtcaaagcaatgagtttcacattgaataaatcgattattaaagaagtgtgcggagagacctcatataaaagaggtgaagcctattataaatcaaataaagtgataatagatcagtacgatgaaaataaagaaatttgtgaggcgacagtaaaagggaacgaggatttccatgttacagtagcaaaagccaaaaagggtgatgttgttgcaaaatgtagttgtccttcattagcgtcttttcaaacgtactgtcaacatgttgcagcagtattaatacaaataaactataatcaacaaacaggtagaatgagctccactagtaacagaaatgatcaattgacaagtggtatgtttcagctgtttgcagacaaaccactgaggccaaaaagtaaacaacaccgttttgatacacgtgaaatattagatattgagtttatatgtacaccagtagctacgagaagtggtggggctcttcttggaattcaattgaaacttgccaaagtgtatttcataaatcatattagagaatttctttctaaggtggagaaaagggaatcttttcattgttcaaatgaatttacatatacaccagatgtacatagttttaaacaagaaacggatgcaattattcagcagctcattaaaatgtatcataatgaaaaaatgtatgaagatacgctagaagtacatgcgaaacaagatgaaagtatgatatttataccgccagcttcgtggaaggatatgctctcttcactttctaaagttgaatatgtacagctgaaacaaaatgaacaactgtttcagggattacaagtttcaaaaggtttgttgccgttacactttgaatttacgaagggaaataatggcggatttacacttcatatagatggtctaaatcgtgtacaagttatggatatgtataacaatgcactttacgatgggaaattatatcacttacacattgaagattgtatgcgacttattgaattacaaaagatgatgagtcgctcaaatagtaatcagttttatattccagaaagtaagatggaacatttcgtcgcgaaagttgtaccaggattaatgaagctcggaactgtacacattgatgaagtaatatcggatcgtgttgaaacaccttcgctaaaagcgaaattgtatttagaccgcgtgaaaagtcgcttattagcaggtcttgaatttcactatgggaacgtcatgattaatccgctagaagaggatggacagccgtctgtttttaatcgtgatgagaaaaaggaaaaagagattttagacattatgagtgaaagtgcctttgcaaaaacagaaggcggttactttatgcataatgaagaagctgagtataactttttatatcacgtcgtgccaacattaaaaggtttagttgatatttatgcgacgacagcaatcaaattgcgaattaataaaggggatgcagttcctcttattacagtgagaagaaaagaaagaattgattggttgtcatttcgttttgatataaaaggaataccagaagcagaaattaaaggtgtattagcggcccttgaagagaaacgtaaatattatcgattggcgaacggttcgtttttatcgctagagagtaaagagtttaatgaaattaatcagtttataaaagaatcaggtattcggaaagaatttttacatggagaagaggtaaatgttccacttattcggagtgtaaaatggatgaacggacttcatgaaggcaatgttttaagtttagatgattctgttcaagagttagtagaaaacattcaaaacccgaaaaaattaaagtttgctgtgccaaatactttaaatgcagaaatgagaaagtatcaagtatatgggttcgaatggatgaaaacacttgctcattaccgttttggcggtattttagcagatgatatgggacttggaaaaacgttgcaaagcattgcttttatagattctgttttgcctgagattcgagaaaagaaactacctatattagtcgtttcaccatcatctcttgtttataattggtttagtgaattgaaaaaattcgccccgcatattagagcagttattgcagatggaaaccaagcagagcgccggaaaattttgaaagatataacggaatttgatgtcgtaattacgtcatatccattactgagaagagatataagattgtatgcaagaccatttcatacactattccttgatgaagcgcaggcgtttaaaaaccctacaacgcaaacggcaagagctgtgaaaacaattcaagctgaataccgttttgggctaacgggtacacctgtagaaaattcattagaagagctatggtctatcttccatgtcgtcttcccagaattattaccaggaagaaaagagttcggtgatttaaggcgtgaagatatagcgaagcgagtgaaaccattcgtattaagacgattaaaaggggacgtattaaatgagttgccagagaaaatagagcacttacaatcatcggagttattacccgatcaaaagagtctctatgctgcttatttagcgaagctcagggaagaaacgttaaagcatttagacaaagatacgttacgtaaaaataaaattagaattttagctggtttaacgagattgcgacaaatttgttgtcatcctgctttatttgttgatgattacaaaggaagttcagctaaatttgaacaactgttagagattttagaggaatgtagaagtacaggaaagagaatattaattttttctcaatttacgaagatgctttccattattggtcgtgagttaaatcaccaagcaattccatacttttatttagacgggagtacaccagcgcaggaacgtgtagagctgtgcgatcggtttaatgaaggagaaggggatctatttctcatttctttaaaagctggtggtaccggacttaatttaactggtgcagatacagtaatattatacgatttatggtggaatccagctgttgaacaacaagcggccgatagagcgtatcgaatggggcaaaaaaatacagtgcaagttataaagctagtagcccacggaacaattgaggagaaaatgcatgaactgcaagaaagtaagaaaaatttaattgctgaagtgattgagccgggagaagaaaaattagcatccatcacggaggaagaaatacgagatattttaatgatttaatatgaaaaagctatgctttcacatgtgaaagcatagctttttgttgtaataattatattttgttttgtgcaaagtaaagaaatcaaatgttatttaaattacttctttgtacctttacttttgtatggctttgcagctgcctttttctttgcacttgattgccaacggttccatcctttacttcctgtaccttgtcctacaccttttttcggttttgccttcgttttactcatatgatcactccgttatttaaaaatcttatttgataatagtcaatgatttagaaaatactctttataaatgactatgattgctttaagtaaaaataaactgcttgaatgctatagtatatcatgaaattgcaagtaaactgaaaggaattataaagaaaatgaaaataataagaaatactgcggattctatattccgaacgatcacattaattattgtgtatacgttagtttcggtcagtgaaacattttttggattgacgaggcagaaaaagtaaagatgttaaattaacaacaatcaataaagccgtaaaataaagaattgaaaaatattttaaaactttttgttgactttctttattttttgtatagaataatcattaataaaatgtttcagagatgtgacaacaaaacgactatgaaaggacgagtagtagtaggacgtagtttaagcgagtcaggggtggtgtgagcctgatacgaagcctattatgaagaacctcctggagttgctaaccgaaatcctttataggaaagtagacttagccgggaacttcgccgttacaagaagaacagtatcgagatatttcatctccgtattgtataagtgagcaacctctgttgctaatttgggtggtaccgcggaaccaaagcctttcgtcccagttttttgggaaagaagggctttttttgttggcttcttttcacaacatccaaacattttaggaggaaaccaccatgtatcaatcattaatgacagtaagagagactcaaattgcaattaaggaagttaaaacatttttcgaggaccaattagcaaaacgccttgaactattccgcgtatctgcaccattattcgtaacgaaaaaatcaggattaaacgatcacctaaacggtgtagaacgtccaattgaatttgatatgttacattcaggagaagaattagaaattgttcattcactagcgaaatggaaacgatttgcattacatgaatatggatatgaagctggtgaaggtttatatacaaacatgaacgcgattcgtcgtgatgaagaacttgatgcaacgcattccatttacgttgaccaatgggattgggaaaaaatcgttcaaaaagaatggcgtactgtcgattacttacaaaaaacagtacaaacaatttatggaatattcaaagatttagaagatcacttatttgaaaaatatccgttccttggaaagtatttaccggaagaaattgttttcgttacttctcaagaattagaagataaatatccagaattaacaccgaaagatcgtgaacatgcaattgcgaaagaacacggtgcagtcttcattatcggaattggtgatgcacttcgttcaggtgaaaagcacgacggacgcgcagctgattatgacgattggaaattaaacggtgacattttattctggcacccagtactacaatcttcatttgaattatcatcaatgggaattcgtgttgatagtaaatcacttgatgagcagttaacgaaaactggtgaagacttcaaacgtgagtatgatttccataaaggtatactagaagacgtactaccattaacaatcggcggtggtattggacaatcaagaatgtgcatgtacttcttacgtaaagctcatatcggtgaagttcaatcttctgtatggcctgacgatttacgtgcagcttgtaaaaaagaaaacattcatctgttttaatagaagtgagagagggtagtggtcatctccctgtcaagtagacagaaataaaaagagtattatgccacggccttttcccgatattctatcggggaaaggccgtgaagtttttcttggaatcttcattttagcaaagaaaatgattgattttgtacatgcttaaacaagcgaaaatgtacatgtttatcttgacatttacaaataattcccattacgcacaacataatacaagcaaataaaatattgttcatatgcattattcaccttgccctaaaattcttcttcattctttgaattattagcaagattttcatccttataacatgcaaagaacaaaattgttaaaactaaatatcccataataactacaaatataagattccaccaactctgtattaattcaggataaataattccagcataacagcataaaaaaaggatcaccataagggtaatcgaaataactataaataatctttcgtaaatccccctaaaaatgttcaccttcctcacctcgaatttttatagtatcatttcggtaattgaaattttaatatctatgtttttttgcgaaacacgaacataattaattgactagatatctatatttcatgtttctaaatagaaataaacttgtcataataataataagagacatacactctacaaaaaacataataattccaaagggaattgttataatggcaaacaatgtcttagtagataatacacatacaaacaatattcctctaaattctcttgcttttacaagcgttgagatagtggagtaaatatatccaaatataaaaccaaataatataaaatatgtgctcatgttactataaataaaagggaattctcttacgatactgttaatttgccttacagcaatattaacgaaatacaaatctgtaaaattttgatataggtaataccaaatgaaagcgtataataagggataaccaaacaatcttttaacaaaaaatgttctcaattgtagattcctccttttttaaaattatatcatattttgtttattttttatacatatattgttgaatttataaacatcaattgatactctgaaatagtacacaaaaaagcgtattttttcttataaaacacacttaaaacttacatatatatctaattatataaaaataatggaaaatatttttttgtaggaaataaaactgtaaaaaaattaaacaaaatttgtttaacaatattgagtgaaaaaaagcgattggggaaaaattaaattggtatttcaaaagttaagtcatacacatttatttgaacattactcttatgaggatgtgtcgaaaggggggaactctgttgaaaaaatctcttgaagaaatttataaaaaatacccaaaggttaaagaaagaatgaacggtgctctatgtccattgaccaatgttgaagatacattttatcaactgtcactttttattaacgatccttgtttatattcatttaatatgaatacattgtatacacatttaaaagataatgatctcttatttgcactacaaactattattaaattctttcaacaagatacaaatttaatatcagaaaaagacatattaaaaatttctgaggaagatcttcataaagaaaaaatatataatcaaaaaatgttctcagaatatttaactcagagcggagttccatattcacaggggaaattccatacttattataaacgtggaaagataattgatgcggatattattattgctgaaactccatattggtttgagtcttcagttattaaatttacaaaaaaagaactaaataaagcaactaaaaaaaagtaaacagggttcgactccaatttaacaattctctaataacaaaatatctatatatttcattatttataatttaaaccatatttattttacattcgtatttgattataaactatatgtagtttataatcaagttatactagaatttataaaatttaataagatgttggtaaatgtactattttagtatacaggagaagaaatctacaatttaattgtttgagtaataataggagagtgataatttccgaaatacatatatcattataatcagaataatagttttgaactttgataagttatagaataaactactaattgcattaattcaagtggtaatataaaccaaattctaccgacttacatacgtaaaatcaaatttaatactaaatagaagacaaggattggggacacatgaataaatttaaagccaaaacttatattattacatatcagattgaagaccatactgaagtgcaagaacacacagttaaagctttctcagagaaaaatataacactaccattagaagaagaagttaaaagaaggtttaagaaaaaatgtaatattattgcggtaaacgaatctaaaactaattaaataaaaaagtaaaaagcaaccctatctataagtagggattgctttttactttttttctttttcttttaaatgctcttgctcttgtaggatttgttctatgccttcgtaggaaataaaagcgttcccgattgtttgtccttgatctgttattttaccagtcaccgcacaaacaaactcaggttgatgctttctaattttaataaactgttcatcatgcgttatttctacttgatcatccttctttaaaccaaatttgccacataagtcttttggcaaagtaattctacctgtatgatcaattttttttaataatgtcaccttttcacacctctattcagagaaagcttttatctcttctaacaatacaggatttccgaccttttgagcaaaatctttagcttctttgtatttcttcagagacgtaaacgcttctacaatctgtttttctcttcttccatttaaatctacttcatcttttaattcaacaacctttttccagtccttattaatatatgcaacttcaaaatctacatatggacttttagattccattttctcttgaatctttaataattcgtcacctttattatttgccagcatttcatttacaataccttttacaagagaaggcttcttatcaaataatttatatacctgatccgttttcttgtataaattatctaatacttgttggtctacgcttcgaaggttttcatatccaatgttttctaatgattcaattgccttctgattttcgcctattaaagctgtttgatatgcatcaaacagtttatccttttcgtcttggctcaatggtttattatcaagcttattcttctttaagacttcagcatgatactgtttctttgcattttgcttattcttttccgcactcttactatcatttaaagaagtaagggcaaaatttaaacctatggctaatattataacactacctaatatgatataggtttttttgctattattttttttctttttcttttgctgttgctgtttcttttctcttttttttatatcatttttattactttttaactttaaactccattttttatccttagtaaccttttcttcttctacttccgtttcttcaggttcaaagtgttctgattggatcatttttgtattaacaaaatgatctagatcttcaagatcatcaatttgtaacaaggtttccgcaaattgaattatttcatcactaggatctataaagtccgtacggcgtggttttccataaatttgagttaattttgttagacttaacaaaattaactccttaacgccaattagtgagtcttttatgtcataaattttcaaatcagttgtttcataaataactactttcatcttgtcttcatattcgtctaaaacaaaattatatttattccataaagtttttgtatgcacactatttttagctatttgaatcatggatgaaaaatattttaattgctcactaaattctaacgatctaaggtattcaaaacttttatatttctccatgtcataataaagtattaaagatgcatttaatatttgcatctcaaatggaactaaataatgtggatcattatctatactctgtatttttcttttaagatttttttcaataatattaagatcatcttgatttaattctgttattggaatccgatatttgagtgtattatcttcaatttctatgtttgctaatttattaatattaactcgcacgttctatcaccaccatatttcttaaaaaatgttatacatctttatttcttttagcgttttagattgtttttcaatcttaagttcctcttctgttttatcttctaaagttttaaaatcattcaagatcgttgaactaatccctaatccttgaattaatttcattccttctttggtttttacaaaatggaatgagggtaatattaaatctttcccctcataagtcattggaataattaactcatgcacattaatatttttataatatacaattttaggagattgtaatttcaccttattcccttcaaatttataagttaaaaagcattctggatcatacgtacctagcattgctccttcttctttcttataacaattattaggatcttctaaaaaatcatcttttcctgaacgttcatgatgattatttactatattgacttctacatcatcaaagtacgcatcttttaattgttcggatatatcatgagcaatagacttatttgcttcttcaaactcgtccattgttaattgtttttgatgattttcatatgtgtaaaataccttttctatgatgttttttgcttgtttcatatcattttcgctaaaaaatactttttcatttgtttctgtttttttatttgcatcctcacaaccaactaaagtggtaaatgctaatgcaccaacaagtattatgttttttatcttcataaagtcctctccttttatcttctccttgaaaggtaacgtaaggattgtccaattgctctactagaacctgtacttgctcccaattgtccaagtaaatgaggaattgctaaggccaaaataaagaatgcaaacgctactgtaaatgaaacaccatgaccaaaagcattattctttactagcgccataaaacctaatgaaaacgttaatgcttgtaaacacaacgtaacactattatttacaaataatctaatccataaagagaagtaattgtattcatcatttagtgctgtagggatcgctacaactccaatgacatataatagtccaaacaaaacaaatctatacataaacgccaatgcgaatacaaacaaaacaaacattactatcaatgcaatgaagaaaccatataatgaaccttttataaatatcattaaaacgacttcttccattttgattggttcatacaaaacggattttacaattacttcttgaaatcccaatacccaatttataaatggatcatatatacctaatagcaccccagctgtaagagtcataatcattttttcgttgattaccaaaaaaccatccccatcgggttctacataccgcatggaatagatttttaatatttgccacatcaagaatatagctaacatagttgaagataggctattaaatgcatttttgtattttttaaattctttatttcctgttatatcgcttggtttaattacagttgatttcaaactatcatatgttacttttattgtcccaataattgattcataagccaatcccgaaactttgcaagaaacatcaaatgtcccacaatcaaagtaattatctttgtaatcatagttttttataaactcttgtttgtctttatttttaatttctttttcaatagcctttttattttgatcgtaaaattcacctttttttgcatacgctgtagtaagattaatattcattgtgacaaatattaaaagaactatagataagatctgatacatcttttttagtttcatagcggtttctcctttaacttgcaatacttataagacccatcatgattaaaaagattacagcaaataatgaaattccttttctcattatgatagtttttttaatttcgagaatttcagaatcattaggatctctttgatacaatctataaaagccctttttttctttatcaagattttgatctatagttttttcaattaaattgtttacctttttatttactgaaaagtaaaaagtagaaattttgtctgataggtcattcacaataatcaccagcttttaagattatttttctaaactttttagataatcatccaaactattttttaagacattaattctataatcagaaactttatattctccattaactttttcccaatcaacaatcattgttaaagtcattacttgctggggcattgaatctgttgcgtatggattcgaattatagatagatttatagattgcatatgatttcgctgtattatctcctgttttcacagcaaaaatatgatctatatctgttctttctaaaatagagtgagagcgactgtcttcagcaccctcacgctctttttgcttaattgcatcttcaaacatttcctttgcttgtccagttaacatatccccatgatcagcaatactagacttttcaataaactcttttgatctatcgtaaataacactaatttctttttccttttttaatttttcttctaataaatgaatatcattatttatctctttattctttttataaactgagaaagaataaagagatgaaataaccagaaatagaattaaaaggaaatttataatcggtattttcttttggcttttattcatttttttcaccttataacctcatattttatttatgagttattcttccagcaccataataatactttccccaataaggcgaaaagacatcatctatctttacacctgaattattcgaattaatcatttttccgtttccaatgtacattcccacatgtgtaacagttttcccgacataagttccggtgaagaatattaaatcaccagctttaagttgctctttgctgacccttgctgttgcatgatactgttcttcggctgttcttggtagattaatgccaacagtctgtctaaagttccattgcattagaccggaacagtcaaatcctgttggggatgctccaccccacacatatgcttgccctaagaattttgccatactgttatacacaacgttaggatcaaaaatttgatttccacttccatctataactacaccgccagatccttgacccaccgcttgacaattcattgataaaccacctaattcattagtcatatttgtaactataggaacccaatgaatgtttaaatttgtaggatcattagaagctccaacaggcgcatatttatttccgatttgtggtatcgtaacaagtccttgcgatatatataatctgaataagtttccagccatataatctagtccttcatctagtgttgaaaatgtacgtaaaccgcctttccccatgattcccccggggttatttttatttttcacagcgttagatgtacctcttcctgtttcatggaaagcaattgctgtaagaagaactggatcaatattatttttcctagcaatttgaataaaatctttcccctttccagtaaacacaccagccttttcaaaggccttcatatatacaccttcatttacttgtccctctgtgcacatataacttccattgcccatattattatcttgggaattatctttacttccagcatcggcaaagaaaaagatggacattaatccgaacgtaaaaacaagcaatagaaaaaacgctaaaatatacgggtttttaaacaatagataagtaatgtaacttccgtttctactattcatctaaatctcaccaatctatattgctatatcttctatttttttattttcaaaccataattgtttttctaaaggcgttagttgtacttctactttgattttcttagaccctgagaatagaatgcctttaccagcctgtttatccttatctccttctcgtacaactaaggtcgtcttctcctgttctgaaaactcatgagataattctttttctagataagttacctcttcttgtgtcataggaagatataacctttgtacagattgactaataacagcctcaccgtagtttcgcttttcatcttttgcactcataaaatctttaatggactgtgttgctggtgtaattccaacattgaaggaacgtaagactttcatcataaagtatacatattgcatagctagtggtactttaggatcagcaattacatgggcttcatctatataaacttgggttgaccttttatctcctttaagaagctcatatgtggtatgagacagtaaattataataaataatacgttggactttttcgttattatttaaatcaaaaatatcgtaagcaattaaatcattcgaaatatttacgtttgtatagccattaaataaattactatacaaaccatatgtgtatgtttctaatgttgtatggaaatttctaatttcagcatacaattctttatccttttccttatattcatccaacttattgtacaaatcttccataatcgggacatcttttacaccaattttggtagtatccgtatcataatcaatgcctttgtccttatatacttcaataacaattttagaaattatatcttcttctaaatctgtcattgacggatacataagcctaaacatagttaataattgtgtgattttaactaacaaaacacttccagcatcaagttcctctgtagatgaagtaatctttggaagatcaaagggattaattctattacctccacgtaatttgaactttacccattctccgccaagatttttaaatttgcttccaaactcaccttttggatcaattgcaataacccttcttccaaattgccatttacgcatcatatcagcaaacaaatacgtagacttacctgaacctgaaataccgattacgaattcatgtttatttaataaattttcatcatcaacaattacaacattacctgttgtcatatttttcccatttacaatcccagtttctgaaaacatttcattttcatgaaacggaaagaaatacgatacagcttcagagttcatcattctgtacgtcatttccggaatggtattatttgcgagaggtaaaaaagcacgaaatgcatctaaagcacgtatagaaggggaatgtgctgtaccaattgcacccattctactttttattaatgttgttaaattattcaactcttctaaggacgtgcaagataaatgaatgtacgtgtgaaatagataaatcttatcattagctgttgctatatctcttaacatttgaatggctgaatcaacctgtgcttcagcatccgctacagtgtaagcatcggcatgttgagatttcattttgattttattttgtttaactgattttgaaagttgttctttaacttcagccgaattaaactccttaatataataagtaaagctaacgttttcagataactcattcaattcttgaattctttgttgatggataatagtttcatagtctaacactagcaacgttcttgtatggttagaccctaatttcaccccgttttccatctccacaatatgtgaaggagcaatcgctgttagtaattgttcgtttggatctcctactgtatgagcgaaattgtttttttcttttttcgaaccaaataatttagggattttaaaactatatttcatgtaccatcttcctcattaattaatattttcgtccacttgtttttgaagctgattaattaacttctgagccgattcacttcctaatgatatatctaaagaattatgggcacgtccgataataaattcaccaacagactgtgcattatcataatcaagacatgtataaattaattgtagtaattcctcattatttagtggttttgctatcaaccttgcatgtccagttaacatattttcaaggttagcggttacaagagacgcttttctttcaatatcatttaatgatttttcacgattgtttccaattggctgatcaataattacatatcgttttctagcaaccatatctcttgttttttgaatcccctcaacgtattctttatagctttttgtaagcattcgttttgctggattcttttcgccatgcgtaatattatccacatgaatcaaatgtttagataaattaacaggctgagccacctgtgatatttgaatctcattaacgaattgcaattcattaataaatgttttataggaagtaaatattttttgtctctcgttactactcattaatgataaattaacagcggatacatctattactttgacaaaacgattatcatttgtttcatagcaactcgaaaaaatatcacgaatacctaactcttttcttatgtcttgatcattttgttgcatattaatgtcaccctttttatagaaaaattctttatgtcttctttgatatttaaatttccatatcagccgatattgtaagaaagatatatttgatctaatcgggtgtttaattaactgaaatgctgttaacgtaatcgttggtgtaagacaaattaaagctgtgtctcttgtaagacttccctgattataaaaaatcaccatgcccacaattgatattagtaaagctggtgatactatgactaaatcccaaaatgaaattttacctactaaatatttttttgaatcgatattaaggagaagttcaattttaccttccccttttaatcgatcctttctttctctaaagctctctatcactttttttcacctacttttatagaccagctttgatgtaatcaacgaatggtttagcaagtaagaagactactacgccagcaccacagaataaaagaccttttttaaatttaggtgcattttgctcgtcaccttgccaaatcattagaccacaaactaaaccaccaataatgaatgcccaaataaatgtactttgcatgtcagtaaatagcgtttgtaataaatgttgaattcgagtaaacataatttcactccctccttagaataagttagtaagatcagataatacctatttttaaataaaataaccaaaaagggtataaaggattgatttacaaacccaattgcgatcttcaggctaaattatacccttattaccccaaataggcaataagggtataaaaatttttataatttttatttctattaaaaataaaaccattattttctcattaataaggttctatatcagtttcgtaccgaaacctgttgccgtatagtaattcgtccttcccttcatgcaaggggcattaaatttttgaatcattgtgtttcgtttatgctttcacgtcgctccgcaatttgcattgtaagtttagcaaatttctacacttgtaaaagcccaactcaacatcaattctaaaaaatttaatactattcccttgcattccgatcacttctcattacgtataaggcaacaggtaacagagaaaaacctatcaacactactacgaaaagaggaaattttatgttcttatcacaattatctttttatcaattagagattaaaaacacatccccgaaagaagctattacaagctctacaactgaatcattttatgcttatggaagtgcatggttaaaagcctgtaatactattagcaattttttacaacaaaacaattataaaaaagatgatttaaatattgtattcaatgaagacccaaagaatgaagtttatcgttatacttggtcaggaattcacaagtctagtttcaaaaaacttgaaattactattatttatactcaattcgctgatacagaggacttttacagagagtgtacatgctgtaataaagttatgtttgaaggatattgtatacacgagggactagaatatttttgttctgataaatgcttacatacacaatacacgcctgatgaatatgaggaaatgcatgaagatgattatgcttactggacagtatggcttgaataaacaattaattccgttgaattataggttaataaaattcagacccaaaatgtaaaggaggaaataaaatgtattttgactatgaaatacgattgaaagttgaaagggaaagacaacgaattattaaacttttaaaagaaaagggtatttcacaaaattcggaaggtaaaagagtcaccaacttaactcttttgtcattaagtttaatagaaaacaaattactaacaaatagtaagtaaagcgtcaaaaatctaacaaaacatttaacataagacctgcggtagtatgtcaactgaaaaacaaaagaatttttagttatcaaaggcctatttactaaaaaaagacatttcttcccttggtcttcccaaagagtaccgaacatcttcgtgccaagtgcatttctgtctgttgcattttcaacaccagctaaagccttcgttgcttcaagcatagccttttgtccattttcaccaccgccagcaattgcctgaccccatttttcaaactgatccgccgagatttttgttttatctaaaacctcttgcatagatttatctacacctgcaccaaattcggccattttaatacgaccttcttttacacccgatatgttcaacaggattcgcaacatcctgccagttctcttatgaacttctgtacatcactatacagaccagactatatcatcatcttttatataagatgctccccatttcgaatgtcatcagcttacaccctacgcttttcagctagtcgttgcacgttcctttgttaaaggcttcgctcagtattgtctcttttgagagttccactgaattaaaggagttttctatgaatgtcgccactcatagggacaatcatttatccaataggttatcgatattccaacttttagtatctactcctgctgacatgattccttggacttctttagccgaaaatccagcttgaatcatttgatctccatattcagcaataatatctaattgttctggtggaaatcctgtttttaataatgtattcactagccccaatgcttcctcgttcgtaatacctaacgttgcaccaatctcattggtttcttgtataagttcattaaaatcaattccagcgtaggatgctgcaatagtcgctgcccctttaaccacagcggcatttgtttcatcagaagcatctttatttaatgcccattgtctgcgaacaccttctaatgcttcttcagcgtcaataccataagtactaacgcccctaatcgcttcttccactgattttttcgaagactctggaacatcaaaagtgatatcaatcttagttttcaattttgacatatccattgctttttcaactgctgttgcgattccgccaccagctgccattccaccaatgacgttttcgagtcctactttgagtccttcaaacttcttctctgttctttcggcttcttgttgcaaatcccttaactcatttcgaacttgttgaattgaatttccagcatccacagatcgaagagcacgttgtaatttttcaatatcggcttctgttcctaatgcttctcgtccaataatcccaatcgcttgttctaactgtcgacttgtagccgatccacttttaattgcatttacaagacgattacctaatgcccctgcaaaatcatccacgcttttgcctgtagcgctaaacaacgtttctaattgtcttgttgaacttgccacattttcttgttcagctttcatattaccaagcttatttttcaaaccatcaagtgacccttgtgtaaattcaatttcacgtctaaacgcacgatattgttcttccgatatctttccgttttggaattgcgcttgaacctgctgctccgcttcttttaatttatcgagcttttgtgtagtgttttcaatttgttgtgtaagcaactgttgtttttgggctaatgcttccacattaccaggattaaattttaaaaggcgctctacctctttcagttcggttgctaagctatcactctgtttatttacatcttttaaagcgttttgtaacggctgcgtattcccaccaatttcaatcgtaatccctttgatttttcctccagccattctttcacccctttcttagaatgaatcaaagtctttttggtttgcttttctgactttttctttgtctggattctccatttcagcgaattctgcaatataatcaaaacaatctccaattgtcatgacttccaaatcccaatgcgttaatttcgctttataacaaagagcaaggaacgtatcagtggttaattcttcatcactgaacgtcccttgctctccattacttttctttattttttttttgcgcccatcgtactttgaatcatatccataatttctggaataatctctgagatagggaattcatcaaaaccgtctaaccatgtaattggatcatcaatttctggatttgctgttttcgcatataaccaaactaaatcatatacaacttcaaaatctagcttacttaaatctgcatttgctaaatcaatagtggctagtgaaccctcttgaggatttgaaggagacaaaatccctaacttaaacatatcagcaaataaatcacgtctgaattgcgctttatatcgtttaacagtagctgctgtactttttaatcggacttgttttccgtctattgtaattgtcttttccatttactattacgctccttttggtgctgctggtgtttttacatatacttttttgtaccagtcgttataaattgcttgtgttgttttagcagtcgttttcgttttaaccattggtcttccaccaggtactaaaacaattgggctagaaacaaacttcagttcatttgtatttggttcagccgaacttgtttttgttttagatgcaagtgttggacgacttgctgaacagttatacataacatgtcgtgttgcattgacatcaccatcaaactcaaataataaagcgaatggttttccttttgcatcagccaattcatttaatacaccatccgtttcgtctaattcttcaccgagtgcatcaatagcaaatttttctgggatagtagcaatacttaatgttccatcgtaaccctgattattacttgccgcgtaataaagcatgtcatctgcatagaattcaattaaatcaccgcgtggctcaaatgttagttcaactccaccaggtaatggaattggtgtcccaaatgtaactaagaaatctttactatcaaatggcacgtaatgtacatttttcaaaccgaatgttaccttgttttcattcatttacaacaacctcgtttcatatgttttttgaaataatttctcagattcaataaaaatcccatacgagtcataaggtatttcatgatcgtctaggaccttttccaacttggcttctgcaaccaagtccttttttgtggtataaagttcgatatttacatcatttatcttgtgatagaccttattatcagccattaaatttgctgaaccatccacaagaaaacagatataaggcggctccggaactggattaccaggtgttgctgtgaaatgcgaataagccacaggataacctgtagcttcaagaatttttctaaattctcctaatgttactgtcatgattcaattgccctttcaatacgttttggcaattcatcaattacatactcttcaactggacgaatatgtactttctctggtactcgtccaccagcagctttcgcatgaccattttctaaaagatgcgtcaattgcccttttgtattatggataacaacagctttatcaacttttttctttcgccagccttttcgataaccacctgtttttttaggactattttgtcttaacttatctacagcgatatcagctacatcttcttgtgcatttgttaattcttcttccacaacatttgcatatctttgtaattctctagcaagctctcccgcaaaatcgttcatattaaacatgctcctttgcgataatagtcaatgtttgatacatttcatcatcattcattggcggttcgataatatcaaagatacggcctttcatattgattcgcatttcttctgtaatatcagaagtataaggaatcacaaaacgataaacccgtgtagcttgtgaagctgaagcttcaatgtactcggaacctttcatcgtttttatcattgaccaggctttctttaattcttgccaagatgtttcgattacttgatttaattcatcttttattactacaggttgctcaatactaattcgattcctgaaatcacctgtattcagcggttttttatactgaaaaggacgcatattaatcaccgtccaacttaattgcttctaaagcttttccaatgcttaaactattaatctggcttaaaaaattcttatcaaaatactctaaggcatcgttataaacataacgagagcgttcaaagactaattccttgaacacctcatcaatattaagatcataattaccacaaaccctagttaaatctttattggatgcaaataggatgcgtcttaggtttgcatcttcatcatcacctaatcgcatcctatctttgaattgctgtaatatttcatttgaaattaccttatccattcacatcattccttatttagttgctggtggagttggtggtgtaaaagaaattttcaaatcataaacaagagctgctttattatcttttggtttaccattagcaaactgtttgattgtataaagcgtagcatcttcaatcgctaatgtttggtcaaactttttaagtttgtatccacctgctattgctgcgatatattgtcctttcacaaagaataatgcttttccaactggaacttcttcagattcaacagtttgaatgttataaggtaatgccattacccattggccattagccgtttgaattgtgttacgtgcttgtacaccaattgcatctacaggattgacaaccatcacaattttatttaacactttacgggattttcctttcccatcaacagataaagcttttactacttcataaagctcaccagcaattacttcaccattttcagaaggagcaaatgttagtgtaccggatgattttttatcagtaaccgcacctgtagttgcatttacatctttcattaaacctacaggttgatgcgctactgatccaccaccatttacaaagccaaactctaaaccaacagaataactttctactaataatgttcgaacataacgctctacccatactggccctaattcgagcatgtcatttggaatagcactaaatgcagttaatttaagttgtccaatttgttcttctctaaaggctgcatttatttgccctctaatatcaccgaataattctccccatgcatacgcttttgttgcgtcagaataaataaacttcgttactgctcctaaatcttgcattccaattgcttcaagtaatggatgttcagttactaaatcttcaaatacacgttcttgtgtagtataaggaagaattgaatcatccttaaatcccccatcttgtacaactgcattaaagaatttacgttcttcagacgttaaaacgttttgtccacgtgacgtcaaaatttgagcgtcttgcgcttcgatacgtgcttgtgctgaaatcttttctgataaatccgttacaagagtatcaaacatatcatcaaatgcagcagataaatcctccatttttgtatcttccgctttcaccagattcatatatgcttgttttttcgcttcaaagttttccattgtacctttaattttcataaccataattgtttcctcctaatttttgagaattaaaaaaaccttttccgtttttgattaccctccacttgtaaatgtggtggttctggattaggtttatttgataaattcatattttgttgtaagttattcgttaccctattaataatctgttccaactgttcatcagtaataccactatcactttctcgattatcaaattctactttgtcagcaaaaccttcttgtactgcttgttcagcagtaaaccacgtttcagcttctaataaatctgtaatctcttcacgacttttacctgttttttgctgataaattgaaactatcgactcatcatatgcttcgagtgcattcaatgttttttgaatatcctgcttgtttccataagctattgttgacgcttcatgaatcatcattcgtgagcctgtgcgcataacaatctcgtcagcagccattgcaataatcgatgcagcagaagctgctagtgatgtaacttccacaatgacttttttatctaagtcctttaagtaattataaatctcaacaccttgatcggcatcgccaccaccactgtttagtttaattttaactgtagatgctctaacttctttcaaagcgcttcttacactttcagcactaatagcatcgtaccaccaactgctactaccgatataacctgataacaccatttcgtgctcatcattttctggattaactgcattagaaaactgataaggaatatgttgtattttatttttcattcttatcacctccttcaattgaatttgcagattgataattcttcgtaattacaaattcgtctagttctggattattagagcgttcagcaccaaacaacttcctcacctcatttctagtgaatgcaccacttgctactaatttatcaacagcctcagcatgatctataatatctttctctttcacaccagttacttcaattttttctcctaataggaagttctttttttcaattaatttcgcatttaattcatcttcaatctttttaattagaggactaatacagaattttatataggctttaattgatgtttcgtagtctcccatatcaccacgaactaatgccgtaggaatacctaaaatattagccacatgatctattaaatctttttttaatttagatagttcctctacagaccttccattatttgaaccatcggcaatttccgtataattaaaaccctttatctttggaacaattgcaaaagcatttttacgaaacgccccaaacaatttatccataaagctttgtaatttagtaaggttttccccttccaaattctgtgcagattccatctcagcggttgcacgtatttgattagaaaacatatttgtctcaatcatacgactaaacagttgagtgtaatctttaaatattccactcatgaattttgtcaattcttcattgttataagtaatgtagataacctcgtccatttgaaatgacctttgaaacgtgtaatcctttacggttacatttttaaatacatcagggtatactgcatattcaacacggtcaaaatgatcagcaatgagtaaatcattttgatctgtaagaattgccaacacttcattatcaagtatcaatttgtacacaaaatcttgccaaaagtcagcggcactttgatctgtattcggtctaatattcaataagtaatgccagtcattatattgacgtgtatcctttttcatcatccgaaattcagacagcgaaacggttcgagcaataaaattaatacaagtttctaaagctactttttttaaatacgctctttgattcgtttcaataccaaagaaatcaaaatcatttagcatcgtattaatctctttatttttaccaagtacatccgacaaccaactcatatttcctcctcacccctttcttaaaagtttaatgcattcagcaagtctagcgctgcgccaacatctgtttctcttacctcatccgctcgatacatagcatgtacaaacgcctggaatccatctgtttttctacgaactggttctttcttctcatacattttatttccatcttttttaataacaacgagtacattattggtataccaacgcattaacggattatcaccaaatacaatttgacgatgtgcgaatgcaacttcaattctaggagcaagcaaaccatgaatagctctcggatttctaattacttcaacttcaaatccagcgtcctcaaaaagtgttcttaataaatctgcacgataattatccattatgatttttttgatatcataatagtttcgcatttcaacaaaccaagcaacgatggtatttggatcaattgtttcgccttccacaactgtcagaagatcttgctcttcccattctcgaattggtgcaaacttcttcttaccagctatttcagcatcctgttttttcgaataactataatatttatcaacgaattcctttctagcatacgaatgagatttccataaataatcacccttacttctaaaaagtaatccacatgatgcgaaatcacgaatacttgcataatcaagcgcaccaatacattcatgacctcgtaaatctggcaattcacgattagttgctgcaatctcttcccattttgcaactgacctttctaaatctgtaacaggtaaattcattcgttttgtcatgaactcttctctattacttgggtcatcttctaaatcttcatattcttcttttatagtttcaagtaacccctcagcatattcgctcaatggtttagataacataggattagcaagttcccaattatcaatatcatccacttcagtttcatcattcaatttacagataaaaggaaagacagcattcggacgtgcttcaccgttcaataccttcattgccttttctttttgcttatctaagaaaccgtcacgaacatatccatctgtaccaatataaaattcacgtgggtttttctttttccctaaaccactgatatgaacgcggacatctttattactttcgtattgatgtatttcatcaaatacaaccgcaccatcacgcaaaccatcttttgtatcaccgtttgaagtcctaaacttcagtacactttcagtagcctttgaaaccgtttgagttaacgtcgttttaaaggctcttttcaagacctcattcttcttcacacatttatgaacttcatcagggcttgttttcgcctgttcttcactattcgcaacaactgaaatgttatactctggaatgccatgtaattcactaattaaaaaatgaataataacagaaatcagaccatttttaccgccaccacgccctaacatccataggaatttacgataaaatacacgtccatttttcttataaaacaaaaagacgaatgctattaagaatttttgaaatggttgcatcggaaaataccacttctcaccgaagttaatacaatcctcaatcatttcatcatcaaaatacaaatcgtctctatttaaaacgtatttttctagatatccaattaacagttctctttctttattgaacttcactttcccacttcgataaagttcaatatattcttctacatatttttgcttaatcatgtaagatcacttttgttatatcctgtatcagggttagtatttttaacaacaaactttatatctctccctaacgcaattaaagaactgttaattttattcctctcacttataagagggtgggccttaacgaaaacttgagttccatttttgattgttacggattccccttctttagttatcgttttattaatttttcgaaatgctttaactagatcaatatagcgttccaccttttcaacttcaactaaatctgtcgtatcaacactattcattaactgttcctttaaccttacaatactaacagccatctacccacccccccttacgcgcgtattttcgaaaaaaacctgtcagttaaccccctcctccggtgccccttagacgaaatattgatgaaatattttaagggggggtgttattaccgaatcatttttaccacttttcatcgttttcccatttgttgattttctttttgaatgttctaccgtgttctttattgtggcaatccacacagattgtttctaaattatctatttctaatgcaagtgctggatgatgttcaagctcttttatatgatggacaacgagttgaatcttcttacgttttgcactctcgctgtattcattcgtgtctgtttgtactcggccattacgtttacattcctggcactcatagttgtcacgcttctttacttgttctcgtatactcttccactcaccactgtcatagaacttacgcttctgctgtttggttttgtattccttcattacacattacaccaccatctgcacaccacttacagcgtaatccatcctttgattttgctattcgttcactatactgttccgtatatccacatgctttacatctaaactgtacaatcttttgtacccttttacttcttaatagatcgtctattagtttgttcattaaacttatatcggcttctctctttgctgctggtgttagattgttatgaaatccttctattacttcaattaagattggcaacttctctacatctacatactcttcaatatcatctaccccaaccgaatgtataagcgtactaatcgcaattgctttctcaagtttagttaattgcatctatcctcaccccttacacttaaatcctttctccgtctgtctctttctagtaattcttttattgatgtttgttccaggtattccacggaataaaacataggtttcccaccatacagcttgtaatacttaacatctattccagcttttttatgcgctttttcaagaggtttaaggtatttgatatatgctttcttatcaatgagcataagaccaagcgcagcaatcttaccatttaaaacgctgtccaattatcctcaccccttatcttctaataaactagcaatcattttatttagtacacttaatgttgcttctccacactctttctctgttgcactgtttactatcggtccgaattcttcttctaatagttgtaagtcgacatgtttagcaagcacatcctcacctacagctataagaattgaactaacaatacctatcttctcaagtttagttaattgcatataccctcactccttatttatcaaatgcaacacgtttgcgcttatctttccttaacaacaaatataatttatatctgaatgtttgaattactatcattaatacgtttgacaatttctgaagccatcgtcttaccatttaaaacgatgggacattctactgtaatatctttcagtgcgctctttcccttaaacctactcataaccttttccaacttctccaatgcagccgtacattcattagcagcttccgttacttctttaattccttttaatgcttcagttgtttcaacatttaattcaattgttaatccttgaatattcttttttgcatcatgtgatttttgtgtatatttgttcattacccacacatctacaaaagcaccattacattttggacaaactgttacttcttgatattcttctttagatggatgataaactttatccatatgaccacatactaaacatttagccttattaaaatactttttcccttcattcaccttactcactccttatctctatctatatactcacgcttttcagaatcccaaacctcacaatagtcgaaacgttctttttcttcttcataccatttgattgcttcgtgcttagaattagttgttgtatgaatatcagcaaatccaccgcaaggataatactgatcgaatcccaaacaccaatatctatcatttaaattgatttcgtccatccttcattctccttcaatcaatttcttttacttcttctatcgcatatactatagcatccaaaatattttccccatctacctttttatttagagatttttgtaaattatcaaccgtagcttttaagccctctacagtttgagataatccttctaccgtttcctttaactcctgattatcggtaaataattgattaatcttctttttcaatatgatgttttgtaataacgcatccttcattacttacacgcaccacctatataatttttacataataaaaagcacccaaatcgggtgctcgatatactgatattcattaagaaaatatataaaaaaacagagaaattcacttccacctcttgatacgcatcgcgatgcgtgttataataaatatagaaagttgaaaggaggtaataacgatttctagtagggaagtaattaagaggttaaaaaaagaaggatggcttatagcgaacattgaaggcagccaccatcagttcaaacatccttctaaggttggcaaagtaaccgtgaaacatccgtgcaaggatattcccaaaggtacacttcgctcaatctataagcaagcgtgttggttataaaccgccccttgctttccctaattatacaagaaatcgttataaaaacaaattatgaaaaaagactattatgtttatcccgctatccttgaaaagtcgtcagatggttacggtatttactttccagaccttcctggttgcgtttctcatgcagatacacaagaagatgctttaaaatgtctttttttagtaaataggcctttgataactaaaaattcttttgtttttcagttgacatactaccgcaggtcttatataaattaatttcaactcgtaaaaagagctaaattacttgtataagtatataatatttaaaactataaaactatatatttttagatattatttttatgatattaaggtcgtaaaaacgaaaaagagtagggtaaatatacctattattatagtattgatttccgttatatacattagtataataataacgtcagagcatgctctgaacagtcagcgttataggggtataacagacaacattcatttttcaaatcataaaatcggattcacttatatgaaaggtaagaaccctcctacaattaggagggttcttattttttctagaatatagctgaattattatgtgttttttgatattgaaatattacaatgaatagcctaaaagagcctcgactttttttgtataactcaaattctcatgtatgaattattggcatctgttaataatgctagtattcaaatccattataaatataggcactatctatgaaaagctcaatatttctcttataatataaatatcatcttataaaacactaccaatattacatgtgaaatcatgtgaaaaaggaggattctcatgaatgatatatccttgaaaataaacaacactcaaaaccctcataatgtagctattaaaaacatttcttccgtatttaaaaaagaatggcttacaagttatgattaccaaaaacagaaacctattcactatcaaagtcaacaagcaccagggcatctctttacctcacaaactataaaaccaattctttatctaacaaaattaactcacgctgctttatatgaagatcacaacctagtatcctcttttcttaaaaaaggtgatacagcttggaaagaagttttaaaatacaaccaaaacggtggtttatgtatttacgcaagtgttttactttactatttgttattggaatccaatgaaatatctaagaatagattatcctttatgcaaggctattatcatcatgaattccatgatcaacatatccttaaaaacatgtatcaaaacggagccttcggacttcattcttatattctctttgaagattacgtaattgacactactatccatcaagtcgcttttaatttttatcctggtgaacacaaagagtttaattttatcggtgaaaccaccggtggcattaacctatacggctttaaagaaacaaatagaactgtatataaatatgcaaaaaagtttgctaaaaattctaatatgacaactgaagagtggattaaatatcaccaatctaaaatgaatgaatacatttcaactcaaatttcactcctaaataacaaaaaggactcttaattaatttaaagagtccttttcctcaaaatatacattataagtctagttaatatgtccttgtacactttctaagataggtgtaaaaagacatgaaagtagtaacttatttcatagtttaaaatgctgaattatcaacggggggagttcatttagtacccattttcttgtccgcatattgagacaagagaatgggtacttttttaaacagagacaccaaagtggatactttttaaaaatagaaaaaacaggaaaatatttttttgatttataaataaaaatattaagatttaatgatttttgaataagaaatttttagtctctttaagatgaataaaatgataaatcatatctaaatcattaaaatggacactagaatcttttccttctttttctgcttctgttataagattattaatatatacttcatatttggaatctagcaattgactaggtactagcgagtctgaaattgaacttagttcttttttataactattaattatattagacaaatcgaaaactccttcctcgtaaagctaaatatagcatgatgtttccatagatatcttttaagaaatgagtagctaataaaattaaattttaatagggaaaatatgtaaccttaaaaagagaaagagtataattgattaataaataaatgtatataaaaaaacaattggaggtacatatgatggaatatagaaaaaatatggattggttaatacaaaccataaaaagggacctgatatttgaatatgaagacttatataaccctacgcgtaatgatgaatgtccttgcggatcagggttaaaatataagaagtgtcatatgaattcgcagataaagtggcgaaaagttgatggtatgtttcatgacggtaaaaccctatatgaaaatatagagttgaagaaagggttattaaataccatgctagatatagtattgtatttaaaagagaacattagaattagcgaagagaaaggtctagaattaataggtgatttatttaaatcacttgatgaagtatttaagcaactgcaaaaaaatgctccttgtagaaaaggatgtatagcctgctgttttcaaccaattaatttagcaacaattgaggaaagtaagataagaaataagcttacaaaagatatagagaaaaatattaataagaatcatcaagaaacgaaaaagagaagaaaaattcctatgtctcaaattaataaaaatagtagtagagcgaaatatgctgaaccatgccctatgctggatgtagaaaataaaaaatgcactgtatatgatgatagaccatttacatgtaggacgtattttgtggcaaattcaccagatttatgcaatatgtatgatggcaaggtaacgatttataaaaatcaaggataccaagagttggtggaaattgtaatttctttaatagatgaaacagtatttggttgttttgaactcaagacattacatgaaactttttataaaaaaaagacattctttaataaactgaaattaattttttaataaaaggaaaaaattaccattaaaatatcacatgacaattaatataatgtgcaatatcaagtagtattggaggtgattattacatgatgatggatctattatcaaatcagacagtattgtttagaattgcaattggaatcaaggaaaaaaattacataccagtaggtatttacatagatggatctgtgaaggaattaaaaatgagtgaccttactgaaaaattatatataattataacgaattattaaaatatattaatttaattattttttactaaaaagaaatgatagcatataaaaattcaaacaatataaaaagggaagagtgatttcttccctttaagttagtatttattttgtgtacattagttttcaaccaccatgatctccatgttccatcatcataataacaggtgtcacagattcattgttacccttgtcagaggaaatgcctgttgtcaaagttaaggccgttaaaacacccattaatcctaatactagttttttcattttaaggactccctttctttgattttttgtcgtgtcttcgaggctagatagaagtattcacttgatttaatgtggcttccttcttcatagaatttaatagccagatactcttggctttcttctatgtattcatatagtgattcgccttcaaagtaagatattccttcaagtgcagtcttttccaaatcctctccagagacattggagataagacattttaaaatagcaaataggtgtttatattcgctatttcctaattcaacacaaatactataccctttatcagctaaatcttttgcaatatcaagttcatctaacttgtaatgctctctagcttgcaggaataaagctttatggtgtctaggattataagtagtcacttctgataaatatctgattgctaatggagataagttctgactagaatacatatatcctaagttatgtctaaccattagggcatacttttcttcatcaagcttcttgaaaatatccatagctttaataagatgttcttctgataaagcccattctcttagctttgtacacgcagttccaagaaggttctcgcagaatccaacgtttcgttcgtaactttcatgtttctcaaaaatctcttttgcctttgcagtatatttaaccgagttaagtgcttcgtatatgtcataatggaaagcacctaatttgtagtaaaactcagctttttcaatctcatctgggactaattcgagaagagattcagccttgtcaaaatgctcttttgcaattgtgtagttaccaataccagaagcatgaatagctttaaagaaatggtagtaataagttaaaaagttgtttgttggaatctcaaacgcttcaaccttatcaaagctacttgcagagacacctaaattatctacaatgtattggaagcggaagtctagaagggaataatataatagtaggttttgatcttctgttatgttattaatcttcttatcaatctcttcctttaacctatgcgcttgaccaatccttcttgcacggatttctatataccattcatttaaaagttgtgtaatcttctcgttccccttaactgaaacgttcatagtatcctcctcatcccatctatatgttatatcttaataaatatcataacagaaattagataagactaaatccatcatataccatttctcaaataaatacagaaaattcagttaattaaagactcaataaaagtatagcataaaaaaataatacttacataatttaaatgttttatatgatttagcaaatttttagaccgcccactttcaggatttttactattttctaaaatagcaagtgtagtttaactcgcgagcttaaaactattcgttaaatagaaatttaacgagcagttgacaatagaaataccattaaaaactactataaaacaagggtaattattttgaagtcagtaactttatcattaacaccaactacttttgttgtaacaggagatacaaagggagaaatgcttgcgaatgcaaagaaagcattcgttgagcaagtatcaaaaaatcttttcccccacattaaatattctattaatgacgcagatgcattaactatggaaacaagtttccctgggttacttgtagaaacagaagaaggcttgaaaggaattgttacagcagttcatagaaagacaccatagatgtcattttagcgggccatctagacgcaaatggtgaaccacaggcgtttataaaatcaaacgcaactttgaagaggctagaagtattcgatgtgaatcttcgaagccaaattaggaagaaggcgacagtaggtatttgaaaaccgaagaagggttcaaacccgtagttgttggaaaaacaactacacaaaaaacaatactacatattattggagctaatgaatcagtaacactaacaccaatagaattaatgcttaatttaaaagataataatacaattatacaggttaggagcaaggagatatggggactaaacgacaaaatctcaaattattggagattctaagactatgacgattcagtataactatgttaaatctacagggtatggtcattcatgtccttttatgtacaaagacatgaaagtaggaactaattttatagtgtaaaatcctgaattatctatagaaaaagttcatttagtacccatttttctgtccgcatatcgagacaagagaatgggtacttttttaaacggagacaccaaagtggatactttgtaaaattggtgctaccccttaaatgtaatgaattttattcagggaataattacctttgatatcctaagctagtttatctatagtataaatgggtatattgatgacattagtatttttatactgcattaattcaaagtgataaaatttctttgtgtttttttaattactaaaaacatttaaaaaacttcacgacaaacacattttagctccactcatcgcacaagttaaaattatataattaatttatagtaaaacaaactaataattttaatataataatattaagaatatacatttattgattataataaaatataaattgaatgcgaggttgtattatgaacaaatttaataatgataatataccaggtttagtttctgaagaaaacgttgaactattaaaagttatggctcatccaatacgtctacaaattgttagtgaattggctaagagcaagaaattaaatgtaacacaattaactaatattttggatattccacaatcaacagtatcgcaacatttatccaaaatgaaagggaaagcactgaaagctgaaagaaaagggttagagatttactatcatattcaaaactccaaagctgataaaatcatacaaatactaggtcatgctaattaaattgaaaaaataggtggatgtacacccaaacagggattactattcacctattttttattttataaaaaacataaaaacgttatagtaaaatttctataattatagtccttgtttaacgtattaaagattttaaagcgtatgttatagaatgtaacgcatcgtaaaaactttacaacatattcataacaaccacggtaccctttctcgttaaaacaagaaaatagtaacgtgtttttacctcataaatagtctaaatccttaagttgatggatgtggggtggtaccccatgcccatcaacttaagaaatcaatcaccctccaaaaacgaaaaaatggactaaattcccatgagcacctatgaaaagataaaattatcgctttgggttcaattcataatgttagattgatggacatatatggtgacatcttttatctgttattctaaatacaattgtattagtaacatatgtatactctcagcaaaacttaatagatatatctaagcttattatcgatagcatgtactagctatatgatgaatagatttttaaggagggggaggatacatgtcaaataaaagtgaaaagtattcaaaatggttagattcatatgattttttatctgctggagcatttgatcctagccttgtaggacctaccttatcaccgattccaccatttacattaccaacaggtcctacgggagtaactggacctaccggggatactggtcctacgggagttactggtcctacgggagttactggacctaccggagataccggagcaactggacctaccggagcaactggacctaccggagatcctggacctaccggagatactggacctaccggagcaactggacctaccggagttactggacctaccggagatactggacctaccggagatactggacctaccggagatactggacctaccggagatactggacctaccggagcaactggacctacgggggatactggacctaccggggatactggacctaccggagttactggacctaccggggatactggacctaccggggatactggacctactggagttaccggagcaacaggagagactgaaggttgtctgtgtgattgctgtgttttaccaatgcagaatgttttacaacaacttattggagaaactgtgcttcttggcactattgcagacgcgccaaacgtcccccctcttttctttttatttactattacttccgtaagtgattttttagttacagttacagatggtaccacatcctttgtggtcaatatttctgatgtaacaggggtaggttttttaccgccaggaccatctataacattacttccacctgtagatttaggatgcgaatgtgattgtcgtgaacgaccaattagggaattactagatacgcttattggttctacagtgaatcttttagcaaatactggttctactgcagcagattttaatgtggaacaaacaggtcttggtatagtgctaggtactttacctataagtccaaatacaatcgttaggtttgctatttcaacttgcaaaattacagctgtgaatattctctaaaatttagatttcttaggagaatataagtttgagggagtgcacattccttacgtcctttaaagattaaagagccaatttacccttaacggggaaagtccggctcttttcttattcaaatttgcttagcgtatattttcgttaaaatgtaggcggtatgccagatttaaaagactgaattcagtctttttttgttttaggggtattaattttttcttagcttgatggacatgtggtggtacccccacaatagaaggatgcacttcagtaaaggggaaattctaagtaaaaaaattcttcgtcaaacacctatttttaaactttttattaaaagtcctttacataccatagaggggtatagtattgtgaaattatggaggtgaggaaatttcgatgatttcagaaaatcttaataaaattgttgaaatcgatcaatgctgctcataagacggtataagaaaaagccgccattcagataaagtaaagaataacttaacgattagttcagaagttaataagtcatatattgaaaggaatgaaaaattatgagtttggaagctttaaatgaacaagtaaaaagggatctttcttatcttgcatttgggggagaggattgggtatgcccaacccaccatcctgaggggcatgtctacgatacagttattataggaggcggccagtgtggcttaggtgtggcctttggacttttgcgtgaaagaatatctaatatccttatcatcgacgaaaacgttgaaggatatgaagggccatgggtaacttacgctcgtatgatgacattgcgtacgcctaaacatttgatatccattgatcttggagtgccttctctgacttttcgctcctggtgggaagcgcaatttggaccaaaaagttgggaggacatcgataagattccacggaacgattggatgaactatctacgttggtatcgaaaggttcttaatttacctgtttttaatgaggtaaagatgaagcttattgagcctgcaggggaagatgtttatcgactgcatattgaaggagcaggagcatcttctaatacattactggcccgcaaggttatcttagccactggtattcaaggtggaggggaatggcacgtaccatctatgatttccgaaacattacctcgtcacctctatgcacacacctcagaagacattgactttgaggcccttaaagacaagaaggtggcaattttaggcggtggggcctcagcttttgataatgccaattttgcattatctgaaggtgtgggttcagctcatgtgtttgttcgccgcacggagatgccacgcattaacccaatgcgacaaatgggggtgtcaggtctaattgaacgttttaatgttctatctgatgctgataaatattccgttatggcccattactttaagcatcaaccccctacaaatgacacatttgaacgtgcagtttcacatcccggctttaaattacacttaggtgcaccatggcttgaggtgcaccatggcttgaggtacagcatgaagctgagaaggctgttgtcactactccacaaggtaattttacttttgattttctaatcatttccactggtcttgtgactgatcattctttacgtccagagctaaagcttttcgaacgccatattgcacgttgggacgactattataatgcacctgctgatatcgccaaccgtaagcttgatgcatatccttaccttggccctggctttactttcacatgccgggacaaaaaggatacaaagcttcttcatggactttttgcttttaactattcagctgtagttagctgtggtatctcagcctcttcgcttccgggaatgagatatgggatacctagactagtttcagctgtggcagaccagctgttctctgataatcgtgaggagattctgaaaaacttctattcttataatgaggctgaatttgttggagaatggacaaataggggttctgaggtaagataattttttcgatatggataaggataaataaaagggtgcagatatcttcccttaacataggctagaatctattggtggaggagcgttcaagcctaattcgaaatatagacttagtttactattcaactattgaagggaggatatacaattggggaaagtctttacaaaatcgacgtgtgcattactattgttaatctttctttggggtggaagttggccaatctataaaatggctgtgccttatacgcccccgttattatttgcaggtatgcgtgcagtgattgggggccttatactagcagctttcatatataaaatgcggaacaggatcaaatggcgtgaaaattggtcgaaatattgtatttcagcattctttaatacgattctcttttttgggttacagacagtagggctcatttatttgccaggaggactgttttcagtgcttgtctattttcagccagtgctacttggattgtttgcttggatttggcttggagagtacatgtcgccgtttaaaattatgggtttgattatcggatttcttggaattgtagttgtcagtgtggacggattaaccgttcatgtatcgatcattggtgttgttttagggttgcttatggcatttagctgggcacttggtgtggtttatgtgaagaaagtgagcaacgaagtagatgctttctggatggtgtctttgcagtgtattattggtggagctattctaataggtactggaacaatttttgaaaactggtcagctattgaatggaatggtaaatacctttttggactcggatatggctccacttttggcattccactggcatatatcatttactataaacttattaatgcgggagaggcaagcaaagtcggtacattcacgtttcttgtaccgatcattgcagtattcattggtacggtgtttttagatgaaccggtaacttaccgccttgtcgtagggctgttattagtaggtgtaagtatttatttcgtgaattatcgcgaaataaggtgaatgcttcattattcaatagagcgcaggcaaaatttaatacggaagagtaaaagcgtaagttctagaataaccagaaatagtttagaacttggcacaccatcaggagggaatatgaatcgccgactccatagcaaaatcaaacccatgtattttgattaatttttgttcaaaacgcgtgggttttttctattataaaatcaatgttcacagcataattttgatcgaaccttattccaaaccaacaatacagccggtcccttaacgtacaggaaatcggctttttctttgtcgaaattgcttagcgtacgaaattcgcgttttgttggtgagaccccatcgctatcaagctaagcttatgcaaagtcaattttagacgagattgtttcttttttctaaagggcaagtgtaggtgattgaaagatttgcatacgaaataaaccctaacgggtttcacttttttgaattaagcggcttgattatcagacatggtacaattgtaaacgatacctaatatatcaaagaccgtttttttctcatatcgatgagatttccgcccgttttgctgtaggagattgaacaggcgaagtaacacctttgatagctcttgggtgtttttttgtatagtttggaatagaagaagaaagtaatctttaatcatatatatggctttatactcactaagctctcgttttttctttatgaggagcaattggcacatttgaaacatgatagaagaacagagtagaatggcaatcaattgaccatataaatggcactccaatcgttctgattttatctttttacaatgatgaatttgaaagaatgacttccacgttttaaataagatttgtcgggtaaaagactggcgcggtatcagttgtgatccgtttccagcctctccccataagaactgctcgtgaggcttttcttgccataaaaaaatcccctccagataaaacagtattgagtccatcatatcagatggactctttttttactgtctacctataggggataataccaagtacccttctcttttttatagttttattattttaattgattcaacccaatcgtgttcttatttcacttgaattccacataaaatttagtgtcgatgattccaaaagcaactttacatggaaacggatttttttctactgaagcagcacgcatacaagaaagtacccaatgttctagttctaaaggtaaacgatatgcttgaatactaccatcattgttttttactgttataatcggtgcatttaccctggttgtagtaaaatcatccgttgttatcattgctactgcatcattagtgtaaaaaccagcgtttaatacctcataaaccattccgtcttcctcattaataatcataggtatatttagaaaggggtattttttaatatcattatgaataactactcctgctgtgttcttctttaattgattcccttgcatttttacactcccttaaatgaatctaacttgataacgttaatttgttctattttacacctattatattagaaaattgcagttttatcttgttataaaaagcatccgtacatatgacagcgctatttgatgggtcaatatcgaaaatagtcatataactagagagtaaataaccatcttcataatatgtaattattatttcttcttcatttaagtttaatttgctcgttcttttatgtgcctttttctttttcgtaatatttcctcctttttttctgcatgttaggcattatacttatcccgaccatatattttaagtggaaatttaaagattttttatttgttttcaagtccctttattccgacaaaacatagcaaagaccgtgcgagcttcgtcgatggattctaaaagggattattcctttaatatggaattttcattataggaggtggcatagcgctatgtcagaagcggagatagtatataccagcaatgaggtctatagtcggttagaagtaagtagcagcactcttagaaagtattcggatgttcttgaacgagaaggatatgatgtaagaaagaatagtagaggaagaagggaatatactgagtttgatgttgtagttattgaacagttagtagagttgagtaagcaagagggcatgactttagagaaggctgcgaaaatgattgcgaagcagtttggaatcgataataagaaagaggagtcccaaggtgcagatccagttccttatcaaatgcagtatcaatttcaacaacaatatagcgctatgataaaagaaatcaataaggtgcagcaagctaaccttttagaaatggaaaatagactagggaatcgtatagatcaaaggaataagttaattgcagaggatattaaaggaagaaataaattattaagagaagatatgaaagatcggaaggaacgtgaagaaaggatagaaaaaaggttagagataagagatgataaccttatgaagatggtaagagagattcaagatgcaaaacgtactattgtattagcccgggaagaaatagcggcagtaaaaaagaaatcttggtggatgttttggaaatgagcacttatactgaagtgtaattgtgattttaaaattctgaattttttttagaaacttataattacaagtcaaactcttatgtaatttgcagaattatgttaatatttaggtaaatgaaagtggttgaggaggacgtagtgatatgagcacaaatcttttcacgcatgaagcagttatgcaacaacttaatgatttttatcaaatgatgttgtcgcagcaaattataaaagcagctgaagtgaaaaaagaaatagatgaaaaaatagaacagattaaacatacagaagaaaaagaaaaacaaaatcaaaacttattattatattattctttactagactttaaatacagaatgctaactgatcgagtaagtattcgaaaagatagttttgaagcaattgatacaatcaataaaacgacagataaactcatagcttattattatcattcttttaaagcagaacatgctttgatgtttagtaattacaatgaagcaagaagacaatatgaagaagctgaaagcttattagagcatatttccgatgaattagagcatgcagagtttaatcaaaaatatgcggtgttaaatcatcatatgtctagtatgctaatatctattgaatacgcaaataaagcgaaagaaatttttgaaaagcatgctggatatgaggtgaaagttgcttcttgcgaaaacacactagggacagcttgtatattcttaaaacaatttgaaaaagcggaagaacatctgaatcgttctattgacctgttgcaaaaacataatgaagaaaaattgattttagtagtaagacataatctaggattattatatgcaactcaaaacttatctacattagcgattcgtcatttatcagaagtaacagagaagattcctacacactttaaagcattattcttacaagcacgtgaacactataagctaagagaaacaaatgttgcacaagaacttattgaaaaaggattagcagtttgtatggaattaggaaatgaagagtatgtatatcatttcaatattttacgttctcttaatgaagatgaagcaattaaactattagaagaagaagtgaataaaagtattccgtacttcgaaaaacagggtttatgggattttgtagaggaatatgcagaagtattagcggttcgcttccgcaaattgaatgagcatgaaaaagttagtgattatttcgatgcatgttacgaagcgaaacaaaaattactaagcaaaggggcgttaaaataatgaagaagcttgtgttagcgatattaggattagttatagcattatcatttagtaacaatacaggtgatacacaacatgctttaaaaaaggaagagattatacaatactcacatgctgatcatttttgattgctaattaacaaggggactccaattatggagtccccttgttaatggggtaatgatttgattccttttagtataacaatatttgtaaaaaatgtataggtattctaaatttataagagtgataatttgataatgaagaatatatattaagttgggattcctttttaaatatgctttctatcacaatttgaatcattgaattgtaattaaatattttaataacgcaataatagttcttatagtgggactattattgtgttatttttcgttagataaataatttcacataccgtaaagatagatatatgtaatccaagacctaaaaagaggatggaagttagaatttgaaatgattttcacaggatttcgtttaagggttctatgaatccgtatgtgtgatttttagtaactttagtgtaattgtattaatttcagttgtatgtaccgttaaaaacgaaaataaagatccgtttttcagaagagggcttaaagatatcattacacaacaatttatagtaaatatctttataatttatgatttaaatattaaaatttataatttgtccaattgacatgcccatctttgggtgctacgttttatactggcgaaagatttacgaggtttattacttgggggcaaagtttgcttcttctaggcgatatacaactagataatctaatgctatgaaccgtacgtagagagggagaaaataaacatgttaaaaaaagtaatgcctattatggctgctgttttaggagctagctttttactcacagcgtgtagtagtgaaaagaaagaaaatacagcaaatgcaaatgataaagattcaaaaacacaatccattcatttaccgtatatggcggaaatcccaacgatggatgtcagcaaggcaactgacggtgattctatgaatgtaatgaaaaacgtatttgaaggtttatatacattaggggaaggaaatacggcaataccagcagtagcaaaatcgtacgatgtgagtgaagataaaaaaacatacacattccatttgagggattcaaaatggtcaaatggaacacctgtaacagctgaagacttcgtgttttcttggaaaagagctgtgaaccctgatacagcggcagaatatgcgtttttattctttgatataaagaatgcaaagaaaattaatagtaaagagttacctatagatcagctaggggtaaaagcaatagatgataaaacattagaaatacaattagaacagcctgttccctactttatagatttgacaacgttcgcaacgttcttaccgattaatgagaagtattttgaatcaaaagggaagcagtatggtttagaagcagatcaattagtttataatggagcatttacgttagataattggaagcatgaacaaggttttcagttaaagaagaatccgaattattgggatgctaaaacagttaagttagacgaaatcaactttgatattgtaaaagataaatcaacagaaataaatttatatgaatcaggtcaaattgaccgtgtaggactaacaggtgaatttgtagataaatatagaaagaatcctgacttcaaggaacgctctgaagttactgtccagtttttacgtatgaatcaaaagaacgaagtattaaaaaataaaaatgctcgcttggctataagtcaggcaatgaataagaaagcctttgtagatacagtgttaaacaatggttcactccctgcggatggttttataccagttaatttcgctaaaggaacagacgggcaagacttccgaaaagaaaatggaacgttagtaaaagacgatgtgaaggcagcagaggagaactggaagaaggcaaagcaagaacttgggaaagagcaagtaacattagaattattaacaagtgataatgatttagccaagaagaatgcggagtatttaaaaggtgagttagaaaagaatttagaagggttaacggtcaacgttaagccgcagccacgtaaacaacaaattcaattacttctaaatagtgattacgaattaggggttgatgtatggtctcctgatattcctgatccaattacatttttagatttatttacgacggacagtacctataactttgataagtactcaaataaacaatatgatgatctaattcatgaagtgaaaacgaatttagctggtaatgagaaagctcgttgggaagcgatgaagcaggctgaaaaaatattaatagaagatggagcggtcgcacctttctaccaactaggtagatcatacttacaacgttcttctgtaaaaggcattgtcacgaatgattttggtggagaatttaattataagtgggttgagttggataataaataaaatctgctctaaaaaaggctgataaaaactctttttgatagaggactgaaatgaatattccagtttgtgtatgtagtagatgaagttagggatggtaatagaattatggataggagatttagattaacagaagaagaagaactagaatttcaggagtttataaaatcagatcaatttgctgaagctttagcaatttcttggaggtatggatgcaaaagagcaacttacttttctataagaaataaaagaaaggatgtacccattcgtttttgtgaattgattgttggaagtaattcagtcagtcatttttctaggaaaaaggaagataaaatagatttttggcacacactaattaaccttagacatcctttctataagatgattctagagatgggctggacttccattcaagagaagaatcgaatttttccacaaggtgaatttaatgaaaaagtatttgtttccacatacataaaattatcgcatgatttaatggtactaacggagaaaaggaagaatcggagttatataagacctagattgcgtatacatggatcagaagatgtacttagtaatatcaatagaattttatatcaagaattaggtgttggggtgaagaagttacaaaccgatcataaaataccacaggcgaaagtaatttcttttcaatcaaagaaggaaattccgtgtattctagaatttgcaggggctatggaaagtttagataagtttcatagtttacgtttgggttatatagataatttgaaaacaggtgaaaaattagagttttaagtaggactccatgtttcttttttaataaactcatagaataaaaaggtttaatagaaaaaaatggattccgattaaggactccattttagttacaagtactgtagggatatagtataattctagtaaggtatattgcattaaagaagtttcatattctttagctgtgattataaatggagtgtagaggtaggattctgcactctgtttttttatgttctcctataagtcttctaacataatcagttgcaatttgcattaaacaaattgataaatcttgtcttaggtaattgtacagttgcagttgccttcttatataatcttgttctttttgactaaagttattaatcatactaatgacagtgtcgtattcaaaaaagaagtatttttcatttgcttctataacaaatacatcattcttgattgggtgatttttgaaaaatgtttcaaagaaagaaacttgttttttattttcttttagtgcattcatgattcacttctccttttaaattaaatgagttgcagcatatgtaattaagcagatcactaaaataacacctatgaaagttgtaaatagagcaagaaatccaagagcaaaccgatataagaaataagcaccaagtataattgctattatgactccgattatggcagctaatgtcccgattgtatgtatagaaattacgttaaaaaatactaagcatatgacaactaaggcaataatagtaagggttctcatgagaaacctcctttgtaatttaaatttttaggatacaaagatacaaagatacaaagatacaaagatacaaagatacaaagatacatgtatcctaaaataaaaagatacggcataatgcgtatctctatatatcctctttagaactaagagtttgaagtagcttctgttctctttcagtcaattcgttttttataaagtttgcgagtagttcatctattacttcatatttttttaagcttcttaaagtacagatattttcaatcaggctaaatgtatcaggagaaacttttatatttttacgattttgcgaaccgacttgttttttttgttggtttgttgcctccgctattgtttgagaagagggtgtatgttcttctacttctcttgtcacatccgcagcttcagtaatcttaggatctttgggttgctctctctttagtaaactcacctatatcaattcctttccctaacttagtaagtttgttatctacgaaatatttaggagtatatttataatctacaatatcacctttagtttcaaatagatgaattctttcttcaagttcgcagaaaatgtcgcagaatagagctaacattctcttatcgtggtgatcttcgaattggaaaccaatacgtggataccattctaggcgagcatgattatttattattgtactgaagacattttcttcaccaaaagtatcaatggtatttttaacaatctcgttgtgcaatgaacgcttcttctgcaataatacaggtaaaattccaactacgttcatttttacaaggtgtccaaagtcatcaactaaggtttgtagataatcaaagattaacctttgacttccctcataagaaaattgttgcgtctcttgcactactataacaaagtcgcttgctaccatagcattatccactttcaggtcagtggaaggtggaatatcaatgaatatgtagtcatagtcgtatttaattttatctagcaactttgcaaaataaaaagttctatctttagtagtcttaaagttttcaattaaaaaatctgtgtactttctcatatcgtaaccgcatggaatcatatcaaggttttcatgaagttttataataccatctgatagattaccatcttctaaacatttcattaatgttttttgcatttcttctattttaaaggattttgctaagaatgtagtcccgtttccctgaaggtctgtatcaatgaataaaactttcttattaaatactagagaagctacaagagattccatacaagagtcagtagtttttcctacgccccctttttgttgggcgttaattattacgtgtccttttttcatagagattcactcctttttaaatgtaacacaattgtaacaaaagatacatgtatctttgtatcctaaatcaatcataacatatgagcaataacatgaaaaggataaatgtatccttttttatattttactatttttttatgggaaaccaaaagataattctataataaatgctgttaaatcaacattttataagtcattcaagaatacaagattaagaggatacaaagatacaaggatacaaagatacaaggatacaaagatacaaggatacaaagatacaaagatacatgtatcttttcttcttttaggggtgtatatttaatatgtatcttttttcgatatttacaaataaaaaaacttgttgtaacgtaatagacaacaagtttctcaacacaatacgatttagtttgataatatacataagaaattcgtaagaatttgtagaatatataagacacataaaacagaaaaaaacaaataaaaaaagaacggctgtttagttcgagatttctgaggtctcaaaccagacaggggaagtagatttgctgacaacatttctacttcttggtgaatacaatttgctgacaacatcttgtattccatttacgtcactgcgactaccagtgagtaaacttcccaaaccgttctaattaactatgctattgagatataaaatatctcttcttagtatagttaattagagtagatttgtaaagatagaaacccttctttaagtgcatttttaagcatgtttaagtatggatttttctgcctttgtatgcaatcttgggaagtctatttattaaggtgagcagtgatataactgctcaccttttttgttgtaaaaaatcagtggaaaggaggttcaacatgaatacagtacaaagcgctatcgaattaatactacataaagggttacgaaaatataaatctaaaaattcgaaagctggattagtatctattgcaacacaagagaaatttgaaagcaaagtgttaaatggcaagaagaataaaaaaggttcagtttttattactcgtaagaaagaagatttaagcgccaagtttggaactaggggcgtagtattatcatctgaagaagctgtactggatcatgttggacaggcttcacactggacacctaatgtatataattttggtacatatggtgaaaatggtcttcgtacaattgtggggcatactgaaaagaacctacaacaaattaactgttttgttattgatattgattcaaagtcattccctatgactgcgattaatgatgtggcattaaatgcaggttttggtgtacctactatgattcttgaaacaacaaagggctatcaagtgtattatgtgttggataaagctgtgtacgtatcaaataacaagaactttatagctattaaatcagcgaaacgtatctctcaaaacctacgagaaatgtttgctgagagtttgtcaaacgtggatttaacatgcaatcactttgggttcttcagaatgccttcagtacaaaatgttgtgatgttctttgaggaaaatgtgtatacattcaaggagttacaagagtggagcaagcgacaagacgacaacaagggaaatgaacagtttcataatgtgatagagagtccttttgctaaaaacgctcctgtagagcaaccaaaacaaatggatgaactatggttcaaacaggtgattagttgtacaaatgtatctccaaaacaaacgaaagcagggcgaaacaatgcgattttcaccctttctttagcgtgtttccaaagtcagtacgttattaaagacacaatggacttaatggatcagtttaatagtaacctagagcaaccgctagatcatactgaagttagaggaattgttatgtctgcgtactctggaaagtatcaggcagcacataaagattacatagagcgtttattacaaacatatggggtgggtggacaggcttcagctttccgtgcgccttctgtactttggaagaaacataagaaacaacgtaaggatcgtgtgcgtagtcattggcacgagtgggaagctgacattattactttcttatcgatgaattcaaataataaacctgtgctatactttacacaatcagaactgtgcgaagcgcttaacattccacgtagtacattaaacacggttctaaaaaggagtacaaaaatctataaaacggttgagggaaaaggcaaaacagcaaaaacaggactatctacacaaggaatgctaattgcatttgctttaaaggaaaacggaaaaagaagagagagctatttaaactatttacaagggctattccctcaaatgggtaatgttcttggacaagcaaaaacaagtaacgctatggcggaagaagaaacactatacggcatattagaagggctaccagccggttaatttttaattgtccactctgccaatacataattatatctacgatacacggttcggtcagctagctatagcgttatggccttacatagtttatgtttcttttattcttggagattagtcttatactactagggttaactactcattatggtatgtgaaatttatagaggtttactagaaaattataatattggtggtgcttactttgggtaaaaattatcctatagatcgtgatagtagagggcgttacagacactcttttgtatttatgaggggggctactgtagatataaagctactaaatcatgatgatttgttaaaaggtaaaatttcaacaatagaagagtattattgtgttcttgatgtggaggggaacggtgctctgtatcaagtaacagttaatttctctgaagttaaatatataaggcatgaagagtttccaactgttgaagaaagatctcctaagtttagcgaggggaagaagaaaacatcctttgtatttgagattggtgaactgataggttgtgtatttaaagatggtaaggggatcaaagggactttattgtctgaagatgcctattatctttatgttaaaactgaaaaagagaattactatacaatcatgaagggtgctttatcttatgttacacatgtgaagcatgatccattacttatgacaaatgatttctatacgaaggaaatgaaactagctgattataaaaagcctacggagtatgtattttctgtagaggatactattacggtttattttcctagtggtaagaatgtatcaggtgttgtgttggatgaaagtaagtattgggtgttgttgcagactgagaagcgccaactaacgatttttaagggtagttactcgtattttaaacatgagccttatgagacaaaagcctatttgtatgttgggaacagaagtttaagaaaggggtaccgccagcatttcggaaaaaaaccacgctaaggattttttctataaaaagagccgttatattaagaataaaattgtcccctgtgcaatacagagttcaatccttagtagctgcttaatatatttgtctaattttttgggttcagttcatataagagtgtcttttccaatagttttttagcagaagcaagaagctccaacaatgattaataaaataaacaatacaactagtaaagcaaagccgccgccacaaccactactacaactaccaccaaatcccataatagttcctcctttaataagaggggaaaacaaggggtcactcatgtattttaatggattcaacttactttatgttttttacacaataattgagcaggtccatttgcaaataaagaaaagacaccctaaggtgccttcctccgacttgaaccatcttaattttaataatattggactcctgtccgaatattattttaccatgttaagttgttttgtaaaatgttccatatcgataattgcaataaacgttttagttttggagttatgtatctgtctaaacgttgaaattaataaaagtccgattggtgagggctgattaaagtttcactttatcgaatttggaactgaaaatgtactagcttgataatgaagcctggctattagaattgaaaaattttagttttattataattaatagaaatgagagtagtgtgaatataaagccgctccaaataagctggtgaatacctaagtttgaaatgaaccagcctccaatagtggttcctaaagtaattccgagatttgagaacgaaacgaatagactgttaccaaattcaggtgcttctttagcttcacttattaaccatgtttgaccaacaattaatccaccagcatgtacgattccccaaatgaatactataaaaatcattggaacagggtaggaacctaaataataaaccaatatgtaaacaatagaatatagaatagggaatgatattacagtgtttattatgcttttttgcaggagaccaccaaataaatgattacctaaaatcataactataccaaatatgaatagcatgatactgatgagagatccattcatggaagttacttttgcaaggtactcggcgaagtagctgtatacggaaaacatggctgcaaaaaggaatgtgacggttaaaatatttaaccataatcctggtttgccgagtatacgaatttgtttgccgaaagacattttttctttaacaggcatagaaggaagtaggagtagtattccaatgaatgcaagagtgttaacgaatgctccgaataagaaagccatttcgagtgaaaattggtctgcaaggtaagaggttagtggtatacctaaagcgaaaccaacagtaattcccatgaaaacttttgtaactgcttgaccgctcttttctggagggacaagtttagcagctgttacaagagcgattgaaaagaagagtggatgaagcgctgccggtaaaatacgaaaaacaagcatgacttcaaattgtgttgtataagcgtagattaaatttgaaataacaaatgtgaaaattgctgttaataaaattattttgcgattaatactagagacgagcagaattaaaaacggaccagaaatagcaacaactagtgcaaatatacttactaaaaatccagcttgtgtagttgaaattccgaacttttcagtgatttgtggtaatacgccgacaatacccatctcggtagtaataattccgaacacacctattgcgagtgtcagaataagtaaaggatttacttttttcatttataaaactctccattcgtatcagtattttgaaagtaaattcattaacaaagaagcattattataagcatgattggatgccaatattatcaggagtatgtaatctgaaatacaataacagatatctaaataactagatatgatatattaaaaaaaattctcctttcgatgtttcttgcttttacaggcagtgcaatttataagaagtcattggatacctgtaaaaaagcagaatgtgtgaaagctaataatcaattagtatgctgattgattattagctttcattttataattcgttttggacgtattcagaaaactctcgtattgttttttcatttcgacgatagtaggtccattttccaattcggtcagactctagtaagcctgcttttttcatagttaataaataactagaaataaccgattgagctaagccagttttaagctggatatctcctacacatactccaacttgaaagttaaggtcttgttctaggtaaggtttttcgtcgaaatggttttctggattttttaaccatgataaaatttgacatcttgtttcatttgacaatgctttataaattaataaaggttccataaggatattatatctacttttatagattcgtaaatgggttttagtgattttaagggaggaaggtatagttgatccccttgaataggaataagatgctcttgatttgtaccctttgtaaaggacattataaaaaaaatcggtaacctaaaaaagatgatttctgtatgcaaacaggagtcatcttctgtacattctattgatagcaagagtgattatagtacgtcatatatttcttaatttcatgttttaactgaacaaacgattcacatgattttatatatgcttcatcggttaaagtattacgaggattacgtgcaaaaatgataatattgttaagtgtaagcatactgttgcctagctatcaatggtggattcctaagaagagtaataataaaacccaactgaagatttaagaaaaattttatgtttaccccactttttattttaaaagtttctcctatcctataaacaacaaagtcatagatgaaattgtaaagttaggggattctacatggatacaggagttttgatgagttatttgtatacttatttttttactattatgttttgtattgtgtttcaaattggattttattttaaagcgaaaagaactatatctattctgcattttttgtgggtatatgtttttctattctacctttcgctagtgtatagggtgacgcagatcgcgactgtatgggatataagtagatatgaaacgtggattcgtgtaagtcaaatcaacttgactctatttgatacggcaggtagtacgacgtatcttttgaacattgtactgtttatgccattaggttttttattaccgactatttggtcgcagtttagaaaaatgaaaaacaccgtatgtgcgggattctttttttcattggcaattgagttaaaccaattattaaataatagaattacagatattgatgatgtatttacgaatacccttggggcaattgtggggtatgtaatatatagagttttatttaaaatgtttaaaatgatatgtaaaagagaggaaaaaaggcttgatacgaactcttctttagttataaaatacgaggctgttttttgtttagttttttcatttgtaggtgcgatgttcatttattatcctggagacatgtaagccggcgatctattctagttcttctcgcttatacacggtaaaatatgaattgttcatccttttttctaacttaatagatacagtttatgtatgacatgataggcaggtgtaaatgtgttaaatgttcaattatctcaatacttactaaaagagtctaaaccagctcttcatacagatgaaaaacgagtgtatatgttaaaagatgaagggcaatcaccgtatcctatttatttaaatcaccctattatgataggagtgggaacgaatttgaatcagcatacaggatttgaagaaattattaaaggatttataggcgcacataacaaatttcctatgtatatgttatttgaaacttatttatgtagagactttattgaagggtttttagaagagaataaacttcattttgagctagtttttactaataagaaaaaggatacgaacttttttaaagtgtgcattaccaatagtgatgatataaccacacttatgaagtatttcttccaatcagcacaagattctctctatacgctattaagctattcagcagactgtaagattatcagtaatcgtactggtgggattgaaataaaagcggacagtttctatccaagcttttcatttatgtatgatgcgcaagaattatttattattggtggagaagaaaaatggtctgatatccattatataaaaagatttttccatcttgagcagattacagatgagctaattattgatttaagaaaatgagagacgagagagaataaatgaaaaaaccctcaagtatagaacgacatacttgagggtttttatgtatgaagaagggccttgtatcatatattttattcgtcgttgcatgtaagtcattcggtttataaaaacaatgtgctaaagagagtaaagaaggcttttctatttttcccgagaatgaaaagaaatatataatctaattttcgtgaatgtaataaggaggcagtaaaatttgaacaggaaaatttggtttgtagttacttgttttgcatttttagtagctagttatattgttgtccaatattttattatggatggatttcaaacagggcttgtaaaagtgaagcttatgtttggatctaaattaagtgcgttctggtatatgatgctatttatacatattacaactagtatagtagcattagtaattggtccttttacattatccactagatttagagaaaggaatatcaaccgtcatcgaataattgggagaatctatatggttggtatattattaggaggcgtttctggactatacctatctttttatgctacgggaggattggtagcgaagctaggtttcggtttgttatctgtattttggctaacatcagcatatcaagcgttacatggagttaagaataaaaaaattaaagagcatcggaattggatgattagaaattattctttaacctttggagcagttacattaagaatttggctaccgttgtttatcgttctatttggaatagagcgttttgaacttagttacgctattattgcttggttagcgtgggtacccaatttaattgttgcagaattattcataagaaaaagacttaataaaggaaaatacaaaggaaatgaggatttacatttttaatgtaaatttgctgtaatattgagggcagaattcttcagtaattgaatttttaaatagctggatttcgtttgtagattcaaaaatccgctaattttattgaataaatagaaaatactttcttttttcgtttatttaatttaatatcaataagggcaccaaaaaaatagatagaggtgctaaaatgtacggtattattaattatgaagtgtttttactaacaggaattttattgaatttaattcctggtgcagacaccatgtacattgtggggagaagtatttcacaaggtagaaaagcaggtatgtattctgtgtttggtattattactggttctttagttcatacgttgttggttgcttttggtttatctattatacttacaaaatccattgtgctatttaacactattaaggttataggtgttatctatcttgtatatttagggattaaaatgatacttgataagacgaatgtagctttccaggtctcgtccaataaattgaacattagaaaaatatatatacaagggcttttaacaagtcttacgaatccaaaagtctctttattctttattgcgtttcttccgcaatttatagatacaaaggcttcaggtcctatgccttttatcattttaggacttacttttacagtaactggactattatggtgtttatttgttgcttatttctcttcatatgttacaaaaaaattaagaggaaaccaaaaggtaggaatgattctaaataagataacaggactgatttttattggtatggggttaaagttgcttcaaacaaaagctcctcaataaacctgaataacataaaaatgccccctttcaagagatgtaatcttaggtttaggctaatttctacatactaaaaagtccctttaactttgaagggactttttgcttgttattttgagttatctaaaagtttatttcaaggtgaggatcggtctgcccgtaaaagcccgattggtgagggctgattaaagtttcactttatttgtattaccaactagcagtttccgtactttccttcaaccacttcacccaatccaaatcttctaccttaagcaaactgagcgaaacacctttcatatctaaagaagttagcaatgtaccaacttttacgaatgtaatctgtaatccttccagctcacataaacggcgaatgtcatttgcgaaaatgtattgctccattaatggcgttgcgccgagtccgttaataaggatggcaaagttgtctccttttctccagcgataaatgcttttaagtttgttcattagttcgattgctaatatttcagaagaggatagtgcttctttacgatatcctttttctccgtgaatgccgacgccgtaaaacacttcatcgtcatttaatgtgaatgaagcttttccttgcactggatcgtttgcaggtgaaagagcaactcctaatgtgtgtaagttttctgtaacagaacggccaattgttgttagctcttctaaagaatgaccttcaagagcagacgcaccaagtattttttgaatgaaaacagtaccagcaacgccgcgtcttcttttattaaaagaagcatcatcttcaattgaaacgtcgtcatttacgatgatatggtcaatttttcttccttcttctttagcgatctgctcagccgctagaaagttctcaacgtcatctttaaagtttttaatgatgaataaaatacttttatcttttggcatgaggcgagtagccgctacaatttgttccactgtaggcggagtgaaaatgctgccgtttactgccgctgtaagcataccttttcctacatagccaatatcagcgggttcatgtccgctaccaccgccgcttataatcgcgacgttttgctttagtttttcgatatcctttacataaatgatgttatttgtttcgtcgtaatttactttgtcgttatgttcaaaataaaagccatgcagcatatcttgaacgatatgttgtacatcattcataatctttttcattgcttttgccaccctttaattactttgctgattgctcaagtaatagtagtaattgattgtttatcatatttttcataagagaagacataatggaaggatctacttcgcacttgctttcaatccaatcttttattgttccaacgaagccgtgactataaaaggaggcaatcgtattttttgtctcatcagaaaggctgaatccacagcttacagatagttcatcaataatcttcatatataagtttttcgtatgctcaaataaatagtgattaaacgagttttgctcaataactttaaaagcatttcggtaaaatttttgattttcataaaagtaatcaaataataaatcaaaaatgttttcccatttttcataatcgagaaagtctataatattttctttcgtttcttctctataaatccagcttaatagttcaaatttatctttaaaatgataataaaaagtttgtctacgcatttgacagtgtaacataatatcgctcactgatattttatgaaacgactctgtttccattaaatatttcaatgagttcgcgattatctttttagaaattatagaagaggtcatctgaatcatccctagaatgttagtaatataaaaatcctatctataaatgagagcggtgtctttagacagattgtccattttgtccgtttactataaaacgctttcattttaacatgagtagtaagaagaagatttcaaatatatcacaatatattaaaggaattgagggataatcacaatgaaaaagattataaacaaaccagaaacattagtaatggaaatgtgtaacggaatggttatggctcacccagagcttgaacttttgaaaaaatataaagtgattaagaagaaagaaatgaacgaaaacaaagtaacgttaattagtggcggcggtagtggccatgagccggcacatgcaggattagtcggaaaaggaatgttagatgcggcggtgtgcggagatgtttttgcttctccttcacaaattcaggtatatcaagcaattaaagaaacagctagtaaaaaaggtacgttattaattattaaaaattatagcggcgatattatgaatttcaaaaacggtgcgcatttagcgacggaagatggaattgaagtcgactacgtcaaagtggacgatgatattgcggtagaagatagtctgtatacagtaggacgccgcggcgttgcaggagttattttagttcataaaattgccggtgcagcagcggaagcaggtatggatttaggagcggtgaaaactgtcgcagaaaaagcagcggttaacgtgcgcacaattggtttagcgttaacgtcttgtacagttccagcgagcggatcacctactttcacacttgcggaagatgaaatggaatacggcgtaggtattcacggcgagccaggaattaagcgtgaaaaaatgttgtcagcagatgaactagcgaaccgtatgacaaatgaccttataaaagatttaggagtaaaagatggcgaggaaatcgcacttctagttaacggttttggcggaacaccactgcaggaactttacttatttaacaatgcagtgacgcgagaattagctgctagaaacattaaaattaatagagtattcgtcggcaactatatgacgagtatcgatatggctggtatgtctttaactgtaatgaaattagatgatgagttaaaaacattactatcaaaagaatgtaatacaccagcgtttaaagtagatggaccagttgaaagtttagagtatgtaaatgtacttgaagaaacagaagagaaggaagtttcatttgaactagaaacagcagaagaacacgctgttattaaagataatgtcattacattaaacaacatgatttatctcgttgataaaatgagcgatattatcattaaaaatgaagtaccattctgtgagttagacacgcacgctggtgacggcgatttcggaatgagtgtagcaaaaggatttaagcaattaaaacgtgagtggcattctattgtagatcaagagaacgtaacaatcggatcattccttgatggttgctccatgattattatggaacattgcggcggcgcttctggtccaatttggggcggtgcattccgcgcagctagtaaagcagcaggcgagaagcgtgagttaacagtgaaagaattcgctgaaatactgcaagcagcactgcaaggcatccaatcgatcggtgagagatcattcggcagaggagcagtagttggtgacaaaacgcttgttgacgcacttgctccatgtgtagactcttggttagatagcgcctcaaacgaagtagacgtaaaaactgcctttgaaaaaggtgcagaagcagcggttaaaggagcagagtacacgaaagaaatcgtagctcgcatgggccgcgctggtacagttggcgaaagaagtttaggataccctgatgcaggtgcacatgcgcttggagttatctttacggagattgcaggtagtttgaaataggaatgagaaagtccctctgtcttaagacggagggatttttctgtagttttcgagaataatagtatgtgtctttttgtatcaccaaaaacgaccgattttggtgatacagaaggacataaatcttgttttttgttatgtcttcatttacaacggttttcaaaggagatattcttagtaagaaattatattgaaaagaggttttgattgtatatgatgaagcttattaatcgctaattaaaattcaaacgaattttatactgtaaaaggtcaaattaaggacaattccttgattttatttgttatacccttttactagtagcggttagaagacattatatcttatcaaaaaatttcatgttatttcacgatatctattctttcgggataggtgtatttataatagacagaaatttgaccatgagaagatgtttcttcttgtggtcttttttttgtcgttttttgattccggaagcatgtttttatgccgttacacctattataaggcggtgattaacgaaaacttagtagtagattgttgtaagaaatatacactctttttaggaaaatataataaaaaatggaggatttatcatgaatgaatatcaattaattagcgactaaattaatgaatcatatcattaaaaaatacgagaagaattataattttatatacttattcgcgaatgatacggtgttagaattttatcctaaatttggttttgaaaaggtgcaagaaagtagcttcagcttgaaggtttcaaatatgatacgtcaaatagataaaaagtaagatttacgaaagttagatgttaataatcaggctgattttgagctgatgaaggaatatgaagccgaaagaattccggtgtcttctagattaggtttgaaaaatagtaacattattcactttaatatattaattattttttgttgtcttgttagttaaaggggtacttagtacaaaaaataaccgtagatagtagcacgaacactgttcttgttataattaatttttttcagaacgtctataatcctcttttaaaaaatatatgtaaatataataaaaaacgaatgattaatagaaatattcgttttttatcggacttctttttattgtacttttattttctttatgagttattggaaaaataattatctatataagtctttattttttcaaaattcttttccataaataagattgctggtacttcaattattggaagattattttcattatcaaaagctggacacggtttgggaactaccaaatagtcaactgagtttttatccctaatataattaattgagacatcataatacttagagaaatattccttcaaatcatcctgattccttaaaaatggtagagaaaatattgaaccataatttataccagcgtcgacaattaatacaaagcatatttttttcatgatacaccctcctcatataataagttttaagttaataactgttccttgaaaattaaatagtttttatcttcaagagctacatcaaaaaatgatgtatgggtaaaatttagtcttggatactgggggatttccctagataatggaggtatagaaatggatccatcgggaatatgcttactccccctgtagttcgaccacgttaaaagactgtgacccagaccaaaatgcactgcatacgcacaagctgtatcggtttccttcatttacctctcatagtggtgggagggcagctaaaaagaagtcctggtggaagttttggaaattagtgtaaatgtcaagataaacatgtacattttcgcttgtttaagcatgtacaaaatcaatcattttctttgctaaaatgttatactgtttaaaagtttgttcatttcaattaatggaaaaccgtagagtttctatccttaagttgatgggcatggggtacagacatgattcgtaaatgtgtactttttacatgatgtataaatttctaatgaattctatactataaacatcgctatatcggttctgaattttctttctattcacagtatactaaaataagggagacttatctcattattttagtatactgtgaatagaattaggcttttgtaatttactccacatatactttgaatgaaatcatgattgcttgtttattgaccaaaaaataaatatatggtatgtttactgtagattagatatatattgaatgcatatttaatgtatataaagtatagcacttaacttaattgcataaactaaaaagacaggatgctggaaacatcccgtccaatatgtaactgccgctgtaaggtggttggttgcaagtttttagttattttctttttgaaccaccttttgtcttgccggacgcggtggttcttttacgtttattattacttttaactaacttatttgcataagcagttgcataagttgttacgaatactgtaatgaatagcttcgtagcatcttgtaataattgaagtaaaaaatccatatcggttacacctcctttccctctttaattaagagaaagaaagggtgcaacctcccaccgcacgtcttcagttactatctacattataccataacccctactgtattaggatattattaaattaacccttttaattttgatagtagctttaaagctttaaatttgaaaaagaagtttcttagtatgtagactaatatcaaatattagttagtttactataatataaatatgtaaatttaaagttttctttttcgtaatgtattttctatgttttatatcaaattactttcttctattgaacgcctctcatactattaagtaaacaataccttattttccaaaaatatcaatattatagattgtgaaactttttctcttataatcagttcctttttttgtaataacagcaattttgactgaacaaaaaaaaaaaaaacgacctctcaaattcgcttgtaaacgtcattggcgtttcaggcaatgcaattagacctgatggtttataaatttattaaaaacaaaaatagaccccttataacgttttttgtttttttaggggtctattctctctggaatttctattcttctatgtcttcttttacttctgcggttaaaatgtcttcagcaaacttcttgtagccattataccctttcttttcggcctttttctttattgcttctaataccttttcatcaaggtataaacttaaatgctgctttttttctttcgactcctcttttgatctattttcaattctttctttgaaaatctccaaatccgattttaagtataatcgttcagtagatttccctttagcaatctctttaaaaggcaatatcccatcttttgctgcattatgaacgtatgtcttagatttgtttagaaattcagcagcttcttttaatgttaaacaatctttgtataattcctctagcttttttacatcctctttttcaaagcaatatcccccatctgctttccaggtatctagattgataggttcgatgtgtttatacttaattaaataacctaattgattttttgttaaacctacccgatcgcatacctcttctaaagataaatagctcatatctcacctcatccgaaactttcattctagctgttctttaaattttcttagttgatactttgttaaacctgtttcttttactacatctttgattgagtactccttatactgcagatatttaaatggattttccatataacgttctcgtaccttattaaatgtactctttttcgacaaagaattcaattgatctcctttctctcggatggaatcgaaaatgggacaacctttgcaatgtttgtagtttctttgttttgcctgttcttgctcatctgtacaattcactgatagattgttcagagggcaaattgaacaatgtgtatcttctaaattatggatttcttgtaaaatttttcgacgaagatgagtcaaaaaaatctcctcctaccgcatttggattgaaatgtacaaaaaaacgagtttaacatttccattatatatcttctaaacagaaacattaaattttaaggtaaaaatattattttaatcatttaagtttataccacggtaaataatctgtttattgtggtataattagaatcataaaaatatatatgaaaacatttgtttactatttcattctataaaaggttgtgtttaaatttgaatattataaattacgaacataataaccaaattgtaaaatcaaaatcagatttttttgatagctctcattttgaaaacattatgggtttaggtatccgtaatattgactattcgcaattaagcgaagaatcattggtttatctatttttacacgatgagccatctttaacgaaaaaaagaagtgagcgaaccaaacaacagtatctgcacgatctttctcattttcttcgttacataaaagaatcaattggaaccatccaggaattatcccataatgagatggaaatctacttctatgaattaagtaagaaatatgctgccactacattacgtaaaaagaaaacaatagttcagcagtttttaaaatatgtgtacgataacaacggactctcagacaactttagtagtcgccttaaaaaagtatccgtaaaaaaagaagagctggtcaatcgtgacctttatccagaagaagttaaccagatcttagatgaactaaaaaaatccaactattttgtttacactgcatttttcctgttaactacaacaggactacgaattgaagaaatcgcaactgctaaatgggcagatttggtctttcattcatctttaaatgcctatctacttcgtgtagttggtaaagggaataaaagtagggaagttcgcatctttgaagatacattggatgctttatgccatgttcgaagtttacgtaaacaaacaacagaactagacacatcgagtacttctgcttttctccctaaagctgatggatcaaattatcgagcggactatctctcttctcttgtggccaaaaaaatagaagaaataaatttagattttctgcgttaccgacaggatagaatcactcctcacacttgtaggcatttcatggctaattacttaatggaaaagggtattgaactaaaaaaaataagggactatttagggcatgaatctatcatgactacagaacgttatttaagagagcgtacaagacgtcaaaacttggccacaatagatataggaaattcattattttagttagtatatataataggaagaaactcgatttaatgtttcgatttcttcctgttttttttgctcatagaactctaaatatttctctatcatcataacatttaaactaattattacaaattaatttaaaatatgacttattattagtcattaggacacaatttaccttttctgttttacactaactttataaatcagaaaggaaaaggtgatgatatgtcccatctaagcaaacgacttgctgaattgagaaaaaaacaaggatatacccaatccgatatatcacatcgcctaaacattgcccgcactacttatgcaaattgggaatatgggaaagctgatcctgatgcagattccatcatgaatcttgctgaaatacataatgtctccatagatgaactattcgggcgaaatgcacccctcgaaagtaaattagaattaattaaagtagcaatatccgatttgcctccacaaaaacagcaagaagtgttagaggttcttattgactacacctacttcataaaaaagcattttgccaaatgaatgtaaaattatttttcagtatttttttatgatacgtgagttaaatgcacttgcttaatattagcctgtataaaggggctacgcattttcagtgccccgccctcgcggaataatctttggaaacccttgtgttatcagtagatttgataacacaagggtttttgcaaccttactaacaatatagtttaaaaatttgatttcgtatcagctatcagtttgtgaatgattcacaaacttttcttgtatttcgaatttgatatttaggaaatatccctaaaaacaacgaatgcgattgcctcctatgagacaatcgcattctaattatttaaaggttaacccattccaccaccgggatctcccattctagctaataaattttctgaatctttttcaactaaattgtttggttgctctttactaccagcagtataaataattcctgctgccaaaataatacttgttactacaaataataatttcttcatatagcaccaccctcatatattataccatttttattaaattctactactatttttttagggaatttgctgtagaacctattaccaacacactcatatagcgcaattgacttttcaattaaagtaatatcattctttgctatacctaaaatacaatattgcattggacttaaaaatctattcttcttctctagtttattaagaatatcaattgcattttgatagttccccttaacaatctctaaaaatgattcttcagcaggatgatatatttttatattctccaactctttcctattaactagcttaataaaagcatatgtattaagaatcgactgctttctttgaagttccctttcaaaattacatggctctaattgttctagagatttatttatatacctggatgcacgctcatagcattcgaaggtataagactctgctaaatatacaagtgccgatgctcttaaaagatgaaaacacccttcaggatcttctaaatctagaatctcctgacataaacgcctagacttttcgagatcatcttgcaccaggtacgcatatgctaaaccttctttaatcctacctaaataagatgttctaataaaactatcagttatcgcattaacgtctggtgataatacctcagcatactcgaataaagaattatatttttctaaatcatacatagtatagtaagttaatatgccgtataaaaccttcatctcttttgtcttaattacttttttacccttacgatcttccagtttagctaacaattcttgctttttaatactgccactatttctaagccatactagttcatatacataggcccattctctattcattgcgagtgaagacttgctttcttgatccactacttgcttaagaagtgataaatcaccttttgaatttgcatattccatggcaatcctcaagttcttcttgcttgttgtgacagaacagaaggtgtgtaacatctttctttgtttattaatatcacccgcatacaatagcttcaataatctaattaaattccaaaatccaaattgatttttccctgttaaattcttcgaaagcgttcctgaagaaatgccaattattttagcgatatcctcttgatttttcctttggaaatcaatttcatcaataattttactcaagaatttgtttaatgttttttctgaaactttatcttctctcttaagtgcttcattcataatattttcccttctaaaaaaacaagaattccctaatatccctcagtatatttgtaacatccaatatcgttatattcgattctaatataatcgtattgaaaaaaatgtcgatttttgtcgatataacaagataattaaatatgtaattgtgcataattactatgcaaactaaaaggaatcgaattaattcgattcctttttttcgcttattttttcacttcagcccatttatagttaaattccccaccaaaatcattcgtcacaataccttttatagaagaacgctgtaaatacgatctacctggttgataaaatggtgcgactgctccatcttctaataatattttctctgctcgtttcattgtctcccaacgagcattttcatcaccagctaagtctgttttcacttgatgaattagttcatcatattgtttattggaatacttatcaaagttatatgtactatctgtcgtaaacaaatctaaaaatgtaatcgaatcaggaatatctggtccccatacatcaacacctaaatcataatcactatttagaagcaactgaatttgctgtttgcgtggctgtggtttaacatagaccgttagcccctctaaattcttttctagttcacctttcaaatactccgcatttttcttggctattgcattatcactcgtgagcaattcgagtgttacttgttctttcccaagttcttgttttgccttcttccagttttccttggctgccttcacatcatcttttactaatgctccattctctttcctgaagtcttttccatccgatcctttagcaaactcagcgggtataaaaccatctgcaggaagagagccattatttaacactgtatctacaaaggctttcttattcattgcctgactaattgccaaacggacatgtttattttttaatacttcatttttttgattcatacgtaaaaactgcatagttacttcaggtcgctctttgaaatcagaactatttctatatttatctacaaactcacctgttagtcctacacggtcaatttgacctgcttcatataaattaatttctgttgacttatctttcacaatatcaaagttaatttcgtctaatttcactgttttagtatcccaataattcggattttttttcaactgaaaaccttgttcgtgcttccaattatccaatgtaaatgcgccgttatagaccaattgctttgcttctaaaccatactgctttccttgtgattcaaaatacttctcgttaataggtaaaaatgttgcaaacgttgttaaatcaatgaaataagggacaggctgctctaattgcacctcaaatgttttatcatcaattgtttttacccctagctgatctacaggtagctctttactattaattcgctttgcattctttatatcaaagaatagaaatgcatattccgcagctgtattagggttcacagcacgtttccaggagaatacaaagtctgcagctgttacaggtgttccatttgaccatttggaatcttttagatggaatgtgtatgtttttttatcttcactcacttcatacgattttgccacaccaggaattactttgttatcttttcctagtgtatacagaccttcaaacacattccgcattacattcattgattcactatcggttgcctttgttacatccattgttgggatctccgctatatacggtaaattaatggattgttttgtttcattcttgtcagttgcctttgctgtatttttagtctctttctcttcactactacaagctgttagtagcaggctggctcctataatagaagctacaaccgatgtaacttttttaaacatcttactttcttcctctctatatgtacggtttaattaatcaaattatctgtatatctaattttaggggatatgcgaatatagattccctgtcactaatagtattcaggcgttttttagcatcatatacgtaatatctctatacattaaacctcttattactttaccattaaaaccgtagcattctagggattattgtgtcaatcactaaaattaatttcaaattaggtatcattctattaaaaaatagtttgattataataattcctttcaactcacaggaaaagttttccgtaaaaaagaaccataaccttgtcgtaatgttttgaaaaaattatagttcatattacactcatatttctaagcgtgctgtctactttctacagggagattgaatagcagcaacaatacctccgatagttctttattcccatcataccatttttattaactatgtatgatacactctacaatagcatctaagtacagtgaattgttaaaaaggaattatgtattttccttgaattatatttatatatatagaatacgtgatgttatttgtgctaaaatgaatgtgatatgaagtattgttaatatatttgccattgtaaaagtagtgtttttaaaattatgttggtttaagtcaaagaaaaagacatctatatagatgtctttttctttgtaatgtactaagaagaatattcttatttaactaattgctgctggatttccttaattaaaagttcagcgccttctggactaagaacaattttaccatgtgctaatgatatatttttttctgaaatatcaccagttattgcacaagcatcataagatttatatttttgtaaaataatcttttcatcttctacgaatatttctataggatctttttctgcaattcctaacgttcttcttaactctttcggaagaacaattcgccctaattcatctatttttctagtaacacctgttgatttcatgtttataccaccttttattttttatatttctagctactttctgcatgtcataccacaattatatatctaaattcctttatcgtcttttaccttgttttctctttttttagcttctaagctaaatttagcgtaagtcattatcttttctagttcatttttggaagcattataatctttaatataacgctcttttcttcctggactcatatatttattttttcatttcgtttattgtttctatattcatgacttttcgttttccctttttaaggctaatacatcactgattagaaataatagtgaaaccaatggaactattcctttgatattgctagaaattccatagcaatgctattatatatctatgaataagtaaaaggatattcaatatgactaggtgcagctacttctattttaattgaaatttcaactatatacagtaacacttttaatataagtaagggagcgattactgttgaaaatgacaaaaggagatgcaatactccgtttgctgacagaaattaaattagagctgaaggaaacaaaagaagctattgaaaaattagatgagagattagataaaatagaaaagcaaacactttctacaaattcatctaaacctgctctaaatactcgaaaagaaaaagattggaaatatccttctaagatgaaatgaattagagggatatttttcattatagaatatgtggaaacaagtagaacatctagaataagtacttttcatcatttaatatagatgttacaatttagactgtacgatgaacatgtttttctttcttactaccacacagaaattgtcccctagctcttgctagggctttttctatgcacaatattaattgcatcataagtatacacacgttataatagtcacctaattacatatgaagaggtgcaaaaaatgaataagacagaattaacaaaagtaatagcagaaaaagcagaacttacacaaaaggatgcagctgcagcaacacaagctgttttagatacaataacaaatgcgctagcaaatggagaaaaagtacagattcttggttttggtacatttgaagtacgtgaaagatctgcacgtacaggacgtaacccacaaacaggtgaagaaatgcaaatcgccgcttcaaaggcacctgcttttaaagctggaaaagaattaaaagaagcagtgaaataattatatatagtcaaaagggtttgatatttatctcaaacccttttttaatagcctttttttcataaaacaaaaaatatcatccaaagtttatataaataatatagattccccaaagaatgtaactaacttgtgttatgatatacattgtaaattcgaaaccagtgagctttctttctctttttatttttcgtaaatacagataaaaacaaaaagtagataaaagcattaagaatacagaaacattatatatattctctatactagtaataaccgatcaactcctcacctgaaaattagttagtatagaataagcatatcatatgaaagtttaacttacttcaaatctactttttttcaacagaatatacttaatattttcatatttaacagaaatacttctttaaaaagataaaagaatctcttttgcatcaatagatttacaaaagagattctaattttagttcatttacttataagatatcaggcttattattcatgagggttaggtgcaatataagctggagctggcccgcaagttactgcaaaagcaaataacaacgcaggcttatatggtagcccaagcaacgaaagcattcccaatgctccccagtaatcctctttcttaagatacgattttatttgattaaaatatgatttactaatacctaatgcatcctgccaacatctttcccaaacgttactagagtacatattagatggaatttcttcatcattcattacataaacaccagctataatagctgctttttcttcattgttatatgaagatttcgctaattcttctttattaagaacatatttacctgttttatcatcctttaccataagtaccgaaaaaatatattctaattctttaacttgagcttctaattcctcctgtgttgcgttgtatttctttccatcctctatagttgcagctgaagcgagagttggtacaaaaactagagtaagagccattaacataaacatcattttctttaacatagtgaattaaccccatgcccatcaacttaaggatagaaactctacggttttccattaattgaaatgaacaaacttttaaacagtataagattatactgtttaaaagtttgttcatttcaattaatggaaaaccgtagagtttctatccttaagttgatgggcatgtgtctctaccccaataatatacttattgagaagggcagagataagtttgtatttaagactgatggttggctagttagaatgaccgattgagattcttttagtttactcattataaggaaaagctttaagattctgcattaaatatataatattcggattcactatgttggttgtaatatgagattttaataaatccttgataaaagagcacatttttatatgtgctccatcccatttaattagcatgtatattctgaatatataaattcaagaaattatatattttaaagtggcgtaaaggggtatttgtatatggtaaaatctgttttaaatatgtcttcaactaattgagtagtttcggcgtcataaaaactatcatatgttgggagccgtggaaataaggggtctattatgttagcgtctgcgtagtcccctttaaaaatagcatagtcgttctgatggtgccatgatttttccaataaatctaaaggagatttttttaatccatattgatcttctagtttcgcgatttccttagaatagttttctaggtagatataattagttacaaaacgttcttcattttgtatatattgtggagcatagtgcgggtttattatgtctgaattagaatcaaaagattttaaataatatagataaagtttaaaggagattttcttattacaattctcatccctgtacagaaattgacgaataggtctccattccggatgttctatatggggtggtgaaaggagtgataagaaagaactgacagctcgtttataagggtttctaacaagtttgtacgcgtgtttttgtttaagccttaattctgtagctacttgtatatagtaaaaaaaagaatttttgtatatatcatactcgtagttatgaataaacggatcgtaattaatcgcttcttcatataatccaatttgataaaagaaccaatttgctagtgaagtgcagccacttttttggctccagaataaaattaacggaaattcatcgtggaagtgtggcatacgtccatgtttaatcataaagttataaatatccgtcattgtcatatacaaccaccctctgttttcttttatcattatttattactgtatgaagtaggcatttaatatatgaaaattggcaatgatgcggattatacgtttttttatttaaacgttaattgaaaataaaaaaagagtgtacaaatgaggaggttctgagaaaaaaataggttttattagtgtttaattaatatatagtgtagctctgtattgcgtaagtgtataaatatgaatattcataaatccttgtcacctccagggatattgggattttaattcacatttacatgaaaatgaatacacagattaaataattgtcacatacctcacaaatgtttcgtcacatttatgattactaaatgaggaggaacatatatgaaaatatttgtagcaggtgcaactggtgtaataggacgttctttattaccactgttaataaaaaatgggcacacggtgtttgcgatgatccgtaatacttcgcaagtagaagcaatgaaaaaggttggtgccataccagtaatagctgatgtatttaatagagaggctgtattttctgtattagaagaaacaaatcccgatgtagttattcatcaattaacgtcattgtcatcatggaattttgaggataatgcaaaaattagaacaaaaggcactcgtaaccttgtcgatgcagctaaaaatgtaggggtacagaaaataatcgctcaaagtatttcatgggcgtatgaaccaggggatacatttacgactgaaaaagattcactacatattactgcttccgcgcctcggcaagtcactgttaatggcatattaaaattagaagaagctgttactgagttacctgaatcggttatacttcgttatggcacattatatggaccaggaacatggtatgcggaaaacggattaatagcaaatcaagttcgtaataatgagattatcgcatcagacgggataagctcgtttatacatgtcgaagatgctgcaagagctactatgctagcccttaattggccttcaggaatcgtaaatattgtagataattatccagcaactagtaaagaatggttaccaatatatgcagcagcgataggggcacctaagcctaaagttcaagatgggaaaaatagttgggaaagaggagcttccaataataaggcacgtaaagagtatggttggatacctttatttccatcatggtctgaaggatttaacaacttaataggtaagtaaaacacaactttaatgggaatgatagtaaaatacaccattaaaggattgggttattatgaatataatttgggaaagtattatattaacttttactggaataattgtcttgaaaatgacaggtagtgcatctgtcagccaaatgacaagagctgaaatcattatagttgtatcaatcggccgtattattgtagaacctgtattaagtagaaaagtagtcccatctatatttgcggccatcatatttgcaagcatactacttattattcatttctttgaattgaaatcaaagaaggtggaacaatttctaaatggaagtagcattataattgttgaaaacggagagattgtaaaagagaatttgatgcaggcaaaaatgtcggagcaacaactatatatgcaattaagagaaaaagggatccatgatgtaaagagtttacagcaagttacagcggaaccgaatgggcgtattggttatcgattaataaaagaagcagaaccaataactttagaaatgttagaaaaagtattagataggtacaatataaaaagataatttctcgtgagaaaaagccaattttttaacgataaaatgtaagagagaactataattaaaagttattaagaattattaaagatatttatatattgattatgcacaaataaaaaggacaagcatataatagaagtacctattaactttaagtaaccttaactttctttaataggatatctcaaaatccccaaaaagagcacttgcggaaacaagtgctcttttatttggaattttaaaccataaatattgaataaaatgttaaaatgaaaagagcaatttttgtaattaaaactgtagtatatgaatggagtgttattgaatgcaaacaagaaaagcctatctatatgtatttgacacgatgtcggattgggagtacggacatttaattgctgaacttaatacagggagatattttaaaaaagatgtagcgccttttaaagtagtcacagttggaataaataaagaaatggttatttcaatggggggcttgaatatacagccggatatttccctagatgaatgtatccttgagagtaacgatctattaattttacctggagggaatacttggagtgaagaaatacataaacctattttgcaaaaagttgatgaggctttaaaacttggtacaattgtggctgccatttgcggtgcaactataggtcttgcaaattacggttacttggattctataaatcacacaagcaatagtttagagtatatgaaaatggtttgtcctacttataaaggagaaaatttttataaagagggacctgtatcatccagtgaaaactttattaccgcatcgggtgtagctcctctagaatttgccatggaggtattgagaaaattagatgtatttgcgccggatacacttcattcatggtataaactgaatgagactcatgaagcggaatatttcttccagttaatgaattcaattaatagctgattagtatttcgaatgaaaattatattttagatgatacgaaaactaataacgaaataatattatgaagataaaaggtaagggtgttcctatgaatatatgagaaaatatccttaccttttatagtattatttctgaaaggcaaaagtaatagcatttgtttttaattgaatgtgtctttcattacgaactatattataagctaattcttttatttcaacttttacttctttccatcctttataaatgttttttaatagacgtatcagttcttcggttgagagattaatttcaattaaagcttctaattcttcattcgtttttaaatcaatttcttgtatgttagagttaataatcaaacaattaataccgccgttttttgtcacttttttcatagaatgaagtacgtttttaaaatcttcttctgatttgatatgttctaaactggatactgcaacgatataatcataagcgttagagtcaatatgatagttttcaattgctgcttgttctgtttttataacctcgaatacatcatgttctttgctataagtttgtagctttgttaaagcggaattaagtaactcaacacatgtaacagtgctgctagtatttcttatcttttgtgcaattggaatgctatttctaccgatgccagagccaagatcaagtacttgcaagttgttttgtccttcaaagtgacccatcaagtccataactgttttaaccggtttgtacagccaagagccaatttcaaatagtttatattgttcatagcaaaggccgtgatatttcttttcttcttgtcttatgtaatcgatacggttcacattgtttcagctccaatatttttattgcaaaatgaataggtgggacagcctttaacatttgtttgaattcgaaaaataccaccagcatgtggatactcttttaattcgtcatcagtcattcttgttctggctgttgtgatatataaatctgttaaattaggtcctccaaatgtacatgatgttacatataaagctggaattggaatgcttaatattttttctccagtagagggattccatctagttatttttgaacctccccaatgtgcaatccataaacagccgtcttcgtcaattgtcataccatcaggtagaccatcattttcagagaaaatgattacatcaattggattatgaatgtctccagtacgtatattatattgatagcgaaccacttttttagtaggtgtatctataaagtaaaagtatgtatgatcaggtgaccaagcaattccatttgatgtatttacatgtgaaacttttttctctacacttaaattatgatgtaaacaatacaaggaacctgcagtattcataccgtatgtatctgtagaacctgcccagaaacgaccagctggatcacattttccatcattgaaacgattttctattaaatgtggttcagggtcaaaaatatgtgtcagtttttcggtatttatattaatagaataaaagcctttttccatagctaagagtagtacatcctctaaatatggaacaacacagccgatttgttgattgagtgaaattactcggttcgtattagcggtaggattgtatatgcataattttctctccataatatcaacccaatataaaagttgctttttttcattccaacatggtccttcagctaaacttgctttagcatctaaaactaattctatattactgaacaagatgttcacctcgcgttataagatattaatataattcgataagaatagaggtaaaccttttagtcaaaggatattaaaatttatgctgtagaaaaatgaccttctcacaagtgattaaaaaagtgtataaacaaggagaggaaaatgcatatgatgttttatgagattgtttgcttttcttgtaagaatatatttcgtgtttacgaaggcagtgaaaaatataagcgatttaaagaaaaaccaaaaggggtatattgttgtgatgagtgtagtcacaaaattcaattagaagcgataaagaattttttttaggtaattatatgtttttgattcggaaaagtttgacaataaaagtgttataaattatcatattaaaaaactaatatttaaaatggcatggaagagaagagtagttaagaaagaatacgtacagagagctctggtagctgagaaagagcggtatacatcttaacgaaaaaagacttggagctgcgcaaggaactaatttatttagggatggtgcgacgggttctcccgttatagagatagggtataagcatattttgccgtacctgaagaggttaatatggtgacatattaacaaactgaggtggtaccgcgaagctaacaactctcgtcctcaagatgaataatcttgggggtgggagtttttttattgcataaaactgagaatacgaaaacaaaaaataattgaggtgagcaataaatgcattgggcgtatgaagtagcacatgaattaattaggaaacatccaaataaagaaacgtttgtttgtgcatctggaattagtccttcaggttctgttcatattgggaactttcgtgaaatcgtaacgacttatttcgtagtaagagcacttcaaggtttagggaaaaagactcgttttatattttcgtgggatgattatgatcgatttagaaaagttccaaaaaatattgatccatcttttgcaaagtatattggtatgccatactgtgatattccagatccgtatggatgtcataactcgtatgcggagcattttgaaaaagagtttgaaacatcgcttcaagcatttggaattgaagtagaatttatttatcaacatgatgaatatagaagtggaaggtataacaaaaatattttagaggctttgtataaacgaaaagaaatatatgatattttaatggattttaaaactggagagtgtagtgaagaagagcgaaacaatttttatccagctacattatattgtgagaggtgtggaaaagatacaacaactattacacattttgatgaagtattaaaaacagtccggtatgaatgtgaatgcggaaatgaaaaagaattatccgtattaaatacaaataaaatgaaactaaactggaaaatcgattggccgatgagatggatgatagaggatgttatttttgaaccgggtggaagagatcactcatcagaaacgggtagttataatgtatcaaaagaaattgcaaggaaaatattcaatcgtgaagcgcctcattacgttgcttacgatttcattggtattaaagggaatcatgaaaaaatgtctagttcttcagggaatagcattacaccaagcgatttattgaaagtgtatataccagaagtaattctctttatgtttgccaaatacaaaccaggcgctgcttttcatattgggttggatgaagatgtgattcgtaattatacagagtatgaacgattgaaagatagctatgaaaataaaacgctcaaaaatgaagatttatttgatgcaattaaactctctaaagttgataggcagtttaaagaatatccgagatttaatcaagtagcaggaacgttaccgctattaaattttgattcatctattttacaagatacattagaaaaaatagatagaagttatacattagatgctatgatagcgatatgtaaccgcgcagagtattggataaaaaactttcaatctgaaaaattaattgcggtaaatcgagagagaaatacagagttttacaacacattagatgaaagacagaaagaatggttagtaaaagtttgcaatatacttcgttctaacaaagattactctaacttaatggagcaattgtattcgatttgccatcatgacaataaaaaaataatgaaagaaaatcaaaaacaattatttattattatttataagctcattatgaatcagtctagtggcccacgtatatcgttattaatacatgtggtgggcatcgaaaaattcatctcattactagatttctaaaataaagctaaaagaaacgcaagtacttagacctctaagtacttgcgtttcaaattttgctagcgtgaatacatttttggacattcatcaccactcggttcataaaaacaatggcttttaaactgtcctacaaatggctgattataccattcaggtggacaagctccaactggacggaaataccaaagagcccatcgtgcaggccagcgccattcaccttgtaaaacttttcgtgcaatttctttttctgattcacgagcgcgttgataaaaatatccatattgtactgcttcaaatccgccggggctttgatatacagcgtcgcgtacggtacggagttgtttaaaatctaagcaatcacaaaatacacggtttactacaacgcatccaactaactcctcaccttggcgaccttcgccttcagcttcagcacgaattaaacgagctagtaaatcaacatcactttcgttgtatggaataaggggcatagtgataccacctttctgttatagtaaagagtgtatgttataaaacaatctgcgtgcttttttacataaaaataacatttaattttaagaggagcttgtataaaaagagctaattagtaatagtagataaatataaaagggagaggtattatgtatcgaattcataaagaccatatcatttactcaatgtcaccagaaaataaaccttgtatggaagtggaaattgggagcagtcttgtatttgaaacatatgattgctttgaaaatcaaatcgattctgaagatgttgtgtttcaagaattagattggaaccgaattaatccagcgactggacctgtatatgttaaaggagcagaacctggcgatatattagccgtaacgattgaaaagattaaaattgcagagcagggcgttttaactacaggtgcaaaccttggtgtaatagggaatgagttaaatgaaaatacagtgaaaattgtcccaatacataatgaacatgttttgttttcaagtgaactacaaatcccgattaatccaatgattggggtaattggtattgcaccgaaagaagagagcatttcatgtggcacaccgcatgatcacggcgggaatatggactgtaaagaaattaaagaaggaacaacattactactaccagttaatgtcccaggagcactattagcgttaggtgatttacacgcagcaatgggggatggtgaaattggggttagtggagtagaggttgctggtgaggtaactgtaacagttcaaattataaaagggaaaaaatggccactaccaatggctattcaaaaagaaaaagtaatgacgattgcttcagaaaaattgctagatgatgcagcaaatcgtgctgtacgtaatatggtgacatttttacatgaagaattagcaatgtctaaagctgatgcaacgcttttattatcggcagcaggtaatttaaaagtttgccaagttgtggatccgttgaaaacggcgcgtatggaattagggatggattatgtggagaaactaggatttacttttagtaaatttcatattaaatagataagggacgaaaaaggatacttttgtataaaagcatccttttttaatttacggattttgtgaaaagaggtagtatttattttatataagtatatttgagattgtggattaaaaaggagttcaataatggtcaaaattatgattgtagaagacgatatgaaaattgcagaactattatcgacacatgttgggaaatatggttatcaaggagttattgtatcggactttcaaaatgtattaaacatttttttagaagaacaaccagagttagttttattagatattaatttaccgagttttgatgggtacttttggtgtcgtcaaattcgcggagtttctacatgtccgatactattcatttcggcccgtgaaggcacgatggatcaagttatggcgttagaaaatggtggcgatgattttattccgaagccttttcattatgaagttgtagtggcgaaaattcgtagtcatttaagacgtgcatatggagattatgcaccgaaactagaagagcgaatgattgagcaacaaggcctttgtttatatcctgaaagacttgtattgaaacttagaaatgaagagattgatataacgagaaacgaagctattttattagagacattaatgaaaaattatccgcgtgttgtgagtagagaagtgttacttaataaattatgggatagtgaatcttatgttgatgataatacattaagtgtaaatacaacacgtgtgcgtaaaaagttacaaacgttacatatagaaggtgcgattgaaacgattcgtagtgttggatatagattgcatattacttgggatactggtatagaaaaatgataaggttgtttatacgtgatcatataccacttatttgctttactataattcaactactagctatatttctcgtatattggtttgatgggcataatcatattacaacggcgttatatgcaatgtttctaggggctttctttatgggaagttatttagtgtttcgttattttacacatcgttctttttatgagcgcttagcaaacccgatgcaatctttgggcgcgacacgtttctctataagcgtttagacgtgaagtgagagtgttgctgaaatttatcttaagcaacaataacttcaaagctttacctatcgcgacccgtaagggttagtagctaccccagccctctcgggctaggatgctacacatttgttcggccgtttaaagaattccctgctcaatctcgtaaatataaagtaattctaacaattgctagccaaacactatctcaattagctctcgacttcacagagcaatacatgtttaccttactaggctcattccgtaataaaatgatatttggagatgtaacaccatatgatgcaaaaatcttttcagatatgtttggtgaaaaagaagaatttaaagaggcagaatctgaacaaggtatttcacctatgcaagacaatcctgttagtcgattaggatcaacctatcagaaagcaaaagaagttgttatgtcaccaggagatattatgggacaaggtgcattcatctgtgcagctcgtattgtacaagataatcatgtgcaacctgtccaacaaattacgagtaactttgtacctaaagaagaattcgcgcatgcactaatacaggtagaggagcgaacaggccaatattgggaaaatgaacgtcttcgtcttattaatgaatctattgcaaaagcaaatcctatgaagcatgtagacgcagagaacatgaagaaattacaacctttgccgcctatacaagaggatgagatcaaacagaatagctctatagaaataaacgaagaacaacaacacattgtatcattggatgattataaggaacacaagtcccaagatgaaattctatctaatgatcctgcaactatgaaccaccagatagatattgatgatggggctgaaaataagttgtatgaagaaattaaggaatttattattgaatcacaacaaatctcaccttctcatctgcaaagaaaattcaggattggctatatgaaggctatgcaatatattgagaagttagaacaaaatctagttgtaagttcttacacaggcgatggtcctcgtaaagttttaatttcaaatcataatagtcagcccgaattagcaaaaggtcccactgttaatgctactcattcattagataaaaattcagagaatactatctcacaaggggtagcgattccaatcgaagacagcgtggctgcggaaaagaagaaaaacaaatttaaagatattttatgtaatgatggagcagactttgtgaaacaaccaggagatagcgaaataccggtagtagaagaaatgccaatagaacgtgtgagtcatgatataaaaaatgcagtagcggaagaaattattgaggaaagtatagatatagaattacctcatatggaagattgccatgatataaatatggaggtagcagaactgaacaaagaattatctattactatgctagagcaagactggaataaggattccatcattcattccgggattcccaatgatcttgaaccactactagaagaattcccatctgatggacttcccgttccaattatagagactgcggaaacaaatatagaatctacttcaatttcagctacagcaacagagtcagacgaaacacatgtagaaatcaatacgattccaattactgaaacgcttaattatacagaagaaaataaacttgatgaagatgtagcaagagtttacgaatctattagtattacagttcatgaaaacttagaaaaaaataaggaagaccattcgagaaatgatgaaaagcaacctgaacataagcgtatgagttacaaagaacgccaagagcgcttaaaatcccagcaaaaaaataaaaataatactacgcagccaacgcttaataaaattgagaaaccaaagcaaaaaacatcaaacgcaatgagtaaagaattgaataatttctttgattaatagtttttaaacctcaaattaaatctagtggaactacattctagattttgatttgaggttggtaaatatacaaaaagtagcagaatacggttagaaaaactattctagattttcttataagagataactgcatactttaaatttaaaaaggcatagtttcaaatatgagactatgtttttttattgagaattctaattatatattttaaaatcactacatataaatttttttataattccttaaataaattgaatcgggtgaacataagtgatgaaaaatgaatatataaaagtgatggcaatagaacagatgtatctatcagcaatgtgcttaatactagtgggaaatgaaaagagtaaattctcgactgaacaatcattagaaataactgaaataatggaggtttctagtaatgaattttcatctattgtaaagctttttcaaaaaaatgagcagcgtattacaaaagaattagaacaagggccagccaattttagtgcggtaaaggaaaaggaattcgaaatagaaacatccgctgcctcaacacttgtattattattaagcagactagaggaaaccttagcaagtttgtttgatgtactcactaagtttgattctaatctccccaaagaattagacctgtctaattcttgcatgaatgagtaccttaatttctttgagaaatatatagataatagagaaaaaaatttcattatcggaacaaggaatcaccagttacttactttttggcagagattaagagataatattgtacatagaaataataagtatgatagagatatcttacaacttggtagaaaactaaaaataagcatttcctatgatctaataaaaaataagttcaaaattcaaatgagagatgtaatattattggctgaactttgtgctttgattttagagaaatgtattattaatggattatgtagatattttggcattgatgaatgggcagttaaaaatcttagaatgcgtagtgaaaacgcacgtgtaaatcgagaattacaattatcgcatttttaattaatgcacattaaggatggggttgctatgactgctataattagaatccccaaaatccacttgtaatcaatctaaaattattcttgcatttgagtaaaaataccattatatttatattaacaactatataaataaatcatattttacgtgaaggacacaccttacgtaccatcccaacggtacaggtgtgtccttttttacgttctaggaggaaaaatgtaatggcagaagacaaaacaaacactcaaactgtagaagaacttggaatggtttttgaatcagagaatccacacggtgacacactgttagaatcaaattttaatcacttcgagcgagtacgtgaacatgaattagaagaattggcccgcatgaaacgtgaacgcactgtagggaaaggtttaattacagtcgtatctgaaaaactattcccgactaaaaacggaaagtctgagcgtatacaagtgcttacaatgcagattggtactcatacaacagcatattgtccaattacagaggcaggtataaacgttcctaaaaaccctcaatggttagtgggtagaacaaagcctgttattattgaacacttccaaaaaacagaagaagggaactttgccgttgtatctatcacggcaggggagttagcacttcaaaaaagattatatgaagaagtaacagcgcaagaaggaaataaggtatacacaggaaccgtatcaggtcatatcccatctgcacaaactgtcttagttgaaattcatggcgtaacagttggggtaaggtactcacactggtcttattcattcgttcgtccggaggatatcgtcattggtgatgtagtagaacttatcatcgataaagtagtggaaaaagatggccgttatgaatttagaggaaataaaaagaaactagaaacagatccaattgaaaaactgttagaactaaagaaacgccgtgatcgctttgtaggtaaaatagtaggggtagatgctattgctgggatcttcgtagaggttgcaccaggtattcagtttaaaggacttaagagccgtaatcttgccaatccaactatagaagatgcaaaaaatcaaacgattgttacatgtgagctgcttaatatcgacgccaaaaatagaaaaggaacagtgcgtatcctaaattatccgcagggacaaagtaaaaaatctaattcgtcaattttccaattttaatggatgactatgtgtacaatagagaaacaattgtctacttatgtcccttctattcctcatttatcaagtgaggatgtacagggacttcaaatatatcgaatacatgaactggataaatcgtatgtattccattcttttgacgaattggttaagtttaagcagcgtttaacagaagaacagtatgccatacttgctttcattggtgttcatacatccgttcgatttaatcatttattatatttattcaaggatagatattcacgtaagaaaataaatgatgcacttcaaggattactttactatcgtctaattgaaaaatggcaagttgagaattttgatatggagatctttgaagaaacatatacgttatccgataatggttataagctattaaaatactggcaaggaaatatgtttttctttgctccagagcgaattgataatcacggtaaatatgttcacctacgttattggcatgatatagatctgctttgccatctacgctatgctccatcctttttagggcatattatgcatccatccattagtaaaggggtttttacccctcctttaagtttttcagtgcaagtgggagtaaatcaagagtttaattttgttgtctactccaccctattaacagataaaaaggatcgcttgaaaaagattattgctagatggaaagatttcgtagagtcaggtaaagatattatcatgagggggttggggaataaccctacaattttagttgtttatgtttctactattcagcaagcacagcgtattaataaagaactgttattagatttaattcctggtagagttttattatgtataggggagaccttacatgtacaaggattacaacatgcattctatcagcctcttgcagaaggggagattaagcaattaaatacaaagttatttacaacaaactaagccatccttataagcacttaaggttggcttttttacctttattcagggagatattagaaatctcagggtgcataattcaaataattttaatggcatttataatcaaaaagattttctttaagtatcttttttgtagatttaaaaggaatgaaatactcaaaaataatatgctaaagttaattatcctatatctgcccctatacaaattaaggattttacgaaataatattctttgacacctttatacaaaataacaatatatacaaatataaccatttgtgtgaaggaatatatttgaaaggggtaaagcattgctacgtatacaacgagggtacatgtatgatccagatgataatgaggtcattgtgaacgaaattttctacaacgctgcatccgaacaaaagttaggaagcaaaatgagtgtgtttgctgcagaaaaactacctacttctatttttaaaaatgttcaagaaagtgaaagtatgtcctatatggaaagtatggaagtagacgaacaaaccattccagaaatactttgttatttagaccagaagcaaaagccagaaaaactttattttgaattgcagtacatgaagtaacgccaagaactgaaaataagaagggagttataaacgtagaaacagaggtattattatatggtacataaaaccactacatataattttccttcttatttttgtttgcttaaaaacaattgaatatgatataaaaatagattaatatataactatatttattgtttaattgattccgtttattcccacaccttttttgtgttgtggttgagttgtagaagcaagttgcgtcttgtttcatttatgaaagggcttctttgagccgattagtgtatatatagcttattttgctatgcacatttttaatcgacttgaagaagccctttttgtgttgtcttcaagtttggagttattgtatagccagcactttaggcaattattttattacttagggggaaacatcatgaaaaaatcacaaagaaaattgcaaaatgatgctcatttacatgacattattgaagaaattaaagaactagctaaccctttatggatcagttctgtatcaatgctgcaagcgcacaataaaaacttcaatacgaaagctacgacatttaaagatattactatttctgatttaagggacttgaaagtaagcttaagtctcatttacgcagcaaggaatatcagtcatacaagtatagaagtgttgaatcagcgcttatccattcaatcgggaaagaatattacttcctatgaggattggctgcttcatgaaaatagagggattatttgtgaaatgattgatgaatttcgaaagaaagagaggattcacccagattcgaaataccaattaatgtagggggattattatgacgaatatggaaagtttacaagccgaatttccatttgaacaattaggttggaagattacacatacattcgaaagcaacgggcgttttttcgcgtatgtagctccatttgttgacgcacgcgccattcaggaccgatttgatgaagtctttggtattgataaatggcaagtgtcttatgaaaaatggggtgagaaagcaacgaaatgtaccatttcagtgtttttgaatgaacgttggatatcaaaagaggatggcagtgaagaatctgattacaatgctgtaaaaggtggattttccaatagcttaaaaagggcagcagtcctttggggcgtgggaagatatttatataatataaaaccacataaagtagagcttactacacatagtaagggtaaaaatgatatctatgtttcttatcaaaagaaagggtattatttcacaccacctaccatgttacagcaaaagaataaacaaggttgttcacagaaagaaccatcaaatgcccaaccaagtctagggttattaattcgagacatgcaacagctagttaaaccgttaggaattacatctagggatgttttgcttgcctataatcacaatcataatgcacaggctagaacattcgaagatacaacgactggtggattagaggatattataactcgtttgcagtggattcatgaggccataaatattagccatgggaatgaaaaacagcttagccgctggttatctacctatatatccggcgatattacgtcctttagagagtggttacttcatgatcatacagaagccattcaccaactcatagaacagttaaaaaaacaacaaagcgcgtaaagctttgttttatagcaggaagacgaatgaacaggatatgaggtctgttctttttttattacttttttggagggatttactatgaattttaaaattaaccgtactttatttattgaaaaattagagaaagctagcgctactgtagacattaaaagcccaatgccagcattacaaggtgttttattagagtgtaattcaaaaggaatgattctaatgggttcagacggtacagagacggtaacattagtgacacgctttaacgtaaacagtggggattgtactgaaccggggaaggtgctttttgcggccgctccggttcttaaaacgattaagaaattcaaaagtgaattcatcggtttagagcatacaaacaatgagctgaaaatcgtagaaaatacgaagaaacaatttagcttttgtaccatggatcatgaagaatatcctgaaattaaaatcgaatcaggagaagactggataacgatgacacaagagcaatttgcaaaaattgctagtagaaccttacatgctattgcagtatcagatacacgaaagattttaacgggtttaaatttaaaatccatggaaggtgagctatcatgtactgctactgattcgtatcgtttagcgaggttacgttttgaacgtacgcatattcctgctgctaaagatggtgaagtcatcttaccaagtaaatcccttaaaacggcgttaaaactatttaatagagaatctaaattagaaatgaaattgattagtgacacgcaacttcttataagaggggagagcattatctatcaatctcgattattagccggaatatatcctgatacatcaaggatgatacccgattactcagatatctatgtaactgtagaacgtagcgagttacaaaatacattagaacagctgtcggcattctcgacattagtaatgtttacttcagaaggaacaaaatctttaagaattgaaccaaaaaactcacaagtaggaactgcgagtgtggaaattccatgcgatcaagaagagacatttacgtttgcttgtaatgtggaatatctgctacaagcactacagacaataccgtctgaagcaatcacgataaaaataattaataaccagagacctattgtgatagtgggagcagatgacaaaactaactctaatctgcagttaattctaccggttcgtgtgtaagggggcatccaaatgagtatgaatcacagtgacttctttgacttattacagtcaaaagaagtccttcttaataatcaagaacttcgtcaatcctttgaatcgattataaatggatttattgcgaatgaaatgcctgatttagaaaacataccattagaacatatagatgaatttgaaaagcaatttgagcagctacgacattatgtcacgttttatagtggtaattcatttcgtataaatggtccagattgtgaattaaaagaaatgctacatttacatcttttcactgaacaactagaagatgtagaaaagcaggggctagaagatgaaatatttatttaatcaaggaaatgagatgaaagtatacattcggatactacgcatacaaaaattaattcgcaaatataacatcccattcttaatcaatatcaatgattttcacagggacaagttgcatatcacaagtgaactattattcgaatcgcttgcgcgttttaatgagcaaacacgtatattttgtcactttgcctttggaactgaagaagacctgttagatgggacgttatttagctcagaagacatgtattcgaatttcgcttcggatattagttctatggctgcggaaggatgttacttcgatacagctggttactatttatgtataggctcggaacatataacacaatctgattttcaattcgtgttacatgaattttcttttaacacctatcaaagtgaagcgtatcccagccatattttgattgaatttctagaggatggttatgaacagtactcatttgatgaatgggtactttcttattatgaaattataatccgtcttgcggcaatgattcgagaaaagacgaaggggaaccaggtatgaaattattatttacatacaatcaccagaaagtaagaaagtatctactttcgttaaaaatacaaaaggatgctcacttactgcatgacttacttgcagataagaaacatgaagaagaaatctacatattagattgtttagagcactcaagagaaatagacttcagcaagatttcagaacaatccattcaacaagtaatggctgccgtttcttatttagaggaagactccaatttcccaattgatttaattgattcgaaaactttacttgaaataattatgcttgcggaaaactctttagatactgatctttcctgcttctatacatcgcaattgtatcttatggagttatttatgcgtatgtatagattaggaattcccgtatcagcttatttcccgacgtatttagaacaagataatttcgaagaatacgattgtgaggattcatttaaaagctggggtgatgacttaattcaagatatgaaattacatcacgaagaggtagatagcgacgataaagatactctaatcaaatattcgaatctatttcatatatccatggatgaattaaacaacattgttgataatgcatggagtccaattggtgagatattttccaatataaatataaaggatcaaagtttctttcgttcaatccaaaatcagtttgatatacgtatgctttaccaagctgaagaggaaaaaatctatcttttctatgatgatgacacatactttccagcaatcaaacgaattgaaatgttactttgtatctttgaagagatacagatggttagtaagaggaatgtataaattaacaaacctttagaggtgatattataatgcgaaaattatttagttctgaaacgcatatatcagttccatactacttgctatggatgaagttaaataaaacttatagcattgtaaatctggaatgtaaatgtcaagataaacatgtacattttcgcttgtttaagcatgtacaaaatcaatcattttctttgctaaaatggtttttgcagtaagttgagcagcttcagcacgtgttataaatctatttggttgccaaccgttctcggtaccattagaaatttttaaatctattaaaatattggcatatttttctccccaatgaccttttaaatcttcaaatctaacctgctcgttatgatttgctgtgctttgtagtttatatgcatttactagcatcgtagccatagcagcacgagttacttttccggatggattaaagattccgttaccttcccctttaacaataccagctttttcagcagcagcaatataagcagtagcccagtgattttgtgaatctgtaaaagatggttttgcattaggatcaatttgtatacctaaaacttttgtcataatttttgtagccgaagctctgtctaatgagtcactcgaaccaaaagttccatctggataaccattcaatacctgtttatcaactaaatagttaacggacttatcagcccatgtaggaacgtcagggaatttatgagtatctgctaaaacatttgaagaataggataatatagctcctgcaaggatacctgttgcaattaatttgtgcttcattaaaataaacacctctaccattgtatttatcaaattgagattttctatttttatatttacatgtttgtcataataatgaaatcgtattataatgtattcaatttgatgtaacgagtatagttacttatatacacaagtgtcaatgaatgtcttttgcaaaaatgtataatatttacatattttcgaatttcccctgatcttataattgacttatgcatatggtagatttaatagttaaatttcttttcgatagtgtaagtttcttgaatttaattattttttactctattagatataggggcatcttattagattatttagtccccctcttccgaatcccatacttcaataaattcaaaaccttttaattcactttgttcaataagagccttcaactcgtctgaaataaagacaaccgtcggatgaatttttccatttatgtaaactttaaaaatcatttcattttgaactatattaaaatcaaatgcgaacttttcacagcctactataaggcctgtaatcagttttttaaagattgctttatcaccatcaatcgcatctagtacattcaacacgtggaccaagtaatatacctcactagttgaattgcgtaagagtggtaaaaattcaacattatcacctattaaaggttcaagtacttgcttggctttttcactaatcattggagcaccagttcctccccaaaatttagggaaatcactatgaatatctccttcaatacactctatatatatatttccccatgaatttgctaaatgagttactgaatttatttttccatcaatatattttttgtgatcttcttcaaaatttaataactggaaagactcatagttatctaatacactctttaatacccatattttcatgcttattccccttaactattcttttatcttctaaagtaaaatagaatattacgtaacaaaaaatcgtttactactatttactttgtgattctaaaatatatcttgaatataaattaccatcactttctatacttattcataataaaaagcttatacaagtgcataagcttcttattttttactctattagatatggattcacattactaatctaattaaattagattaaatttctttacgcaccctcttctgaatcccacacttcagtaaattgaaaaccttttaattcactgtctaaaattgcatttttgaattgatctgatactaaaagatagttaggatgtaccttcccatttatattcaatttaaaaatcggttcgtgctggacaacataaggaataaatacaaattttttacatcctattattaaacctgaacttaacttatcaaagattgttttattagtatcaagtgcttccaacacccttaaaacatgcatagcatagtattttttgtttgtttgtttatgaattaatggtaaaaattcaatattatctcctactataggttctaaaacattcttggctttttcactaattatttgtacaccagactttccccaaaaaataggagaatcgcttgatttcccttcatctgttacctcaataaacttaggcgtccacgaatctgacaaacttaccatagaattaaaaccagttttaaaatattttttatcctcttcatagttcaataattgaaaggtttcataatcatcagtcgagctttttaattgccaaatcttcatatatattctcctttattattgccatttatatagttatttcttgggttcatttaatcgcaaattaccctctaataaatctcttcttatcccatgtaacacttcagctatatcagcttgagtaccacccatttctataacagaattcaatctttctgttacttctcttatatactcttttgagtggctacctatatgtaaaacttcagtagttacataatcatttattttatatggtaaaaacaccccattgaccgcagcatcataacttatccctatctcttgtaataattcctgagcttccacagccctaatatcattccaaggtactatgtgatgtgccgcattaggatatggaggtgtgtcaactcctgcatctttaagttctgcacgtaatttttgagatgctgtataagaatcaggatattcgtttttcacctctactctatcaagaaccttatctgcatattcctgaattacttcttgaacatctttaactttacttcttccactagttttggaaaacataaatgtttcacgagctttgcgtaaaacttcaaatgtttttatttgattgcttccaaatccacttgcacctgcaaatgccaaccgatccgtcagtggcaatttatttacgaaagaagacattcctgtagagaattttgctccttttgctaatgtagtgactttacttatccccttatcaccaataagtccaatttgtgtaaaagcataacttccccacttagcacgactttcagcgtctccatttattacatcattaataaacgaatctgataatgtgttccacatagcaggtaaggtttcatttaaatgcgtaaaagcgtaccccatgttctcccatgtttcccatttaccaagtgccacaacaccatctattgtatcttcaactgcttgacccgtaccttctaaaataccatctataattttttcagaagtagatttttcaggaggtttcttgcacaccgctccctcttccattgatccttcctttaaaagattatcaacttgacgttttctttcatcagcaatttcttggatcgaaacggtccaatccatatttaatccttgtgtactaaacgtaccacttacaggactaaatccttttccactttggacttcagcaaggccggcagtaaggctagctacaagttgaagagctgtgtggtagttattactggacgtatagttaaattcatatagatgctctaatttttcttgcagtttttttctcatctcgactaaaacaataaccatggcatctattccaggcaatactgtagcaatactaatcgcttctatacttgcgaccattcgattaatttcttgaatttgctctcttatttcttgttcgatgacatctgtggaagcaacttgtgattgaaaatcgcttggaaacgcatcattttgatgaatcaattcctcacataaataaataattccttgtgctaaaggacgaaaagtttggacaaaaaatatttttgcactactatatgtttgtccttgcaaaaccgtatcagttgcaaaggtatcaattgattggattgcttgctccatagcttggatagtagcgacacatacagcattcatgctttgggtctgattttgtacttcccctaaatacatatttaaactcatactttgtcctccctttttaatcgctgttgccgataggtaaggtcggtttctaaatcaataagattacgtctttctttaagtaatgtttctttttgattttccaattccaatgttaatttccgctcaatattttgcgactcttgaagcttattcataaaaaaatgagaaacatctttatcaccatgccatgtttctaaaatcctattaaataaacgattatttcgatttctcaattcgtgaaagtccatttctgcttgtctctggatttgaatctctgtttgatttcgatcctgtttttcaaatactatccgtaattcatgattaaattcatttatttgcttttccacatcttgactcatcttattcttcctacccttctccctttaccgtaggttgccacattagcgaaatgtcttttgtagttcgttatccattctttcaaaatccttagctactaaatgaatattatcaattgcttgttgaaaggcctcacaaaattgtctagttaaatctagcatttattgattcacttcttgcgcctgagcattaacagatagtgtagtacggctcgcctttgttatagaacgatttgtcgcaccttgaattgtatccgatgcatttttcatttgtgtagcaatttgtgtagctgtttgaaaattactttgaaagtttcccatcatttaaaccccttctagttccaaaatcatcaagaaaattataccatgtaagaatatttcaatgtatcaaatatttctagtaaggaattgatagctcttaatgataagaatgaagcttttcttaccgaatttcaattaaggatcgcttcaacagatgtagttgaactagaactattagaacaaattgaagagattaaccgaatcagaacaaatactgaagttacaaagcaagttattccactagcaggtatgggtgcaatgaggaacaaatatttttatggagtttggtttaggatggattggagataaaggagcaggcaaaattggaaaagtaacttcccttggagactctgtaaagttaacgaaattttcaggtgatacaccttatatttcaagccacttaccattaaaagatcgatttgcttttgctggtggagatggtttgcgctctagatttgacacaccaaactttaaacaagctgaagaaaaatgctctacctattaatttgctagtagtggaagaattaatagtagcagaactaatgatggcaatgttccgtatagttttgattcatcacttatggagcacctttttcatggggactaaaagctgttggatatcaccatgaaagtatgatgggtggaggagaaatagttagaattacccatgcaccaaattctgcgggagtatatagagcaaaagtaaaagtagacggtgaaacaaaaaatgcgctttcttcatttttccctaaggattgggatagagtacaggtacttgagtctatcaaagaagcatacgataataagattcaagtcgatacagttagatatgtaggacaaacatcccacggatttaaagtagaaatgattatacaaaataatgagataataacagcatatcctgtttatactaggaggtaaaaaatgaaatatacatacgaattttatcgtgatggacttggcggattaagaatacgtttgccaaaagaaatttctataatttctcatttcttggaagatattttagatgatgaagcagctgagtatatacaaattttagataatgtagtagaccaaaaagttccgcaatatgaaatagaagggaacgtagcagcagtctacattgaacctaattacaccagtgctattaacttatttatgagtgctccaaataaccaatgtaaaattgagacctctgaatttagaaaactacttgtgttgtggcgagatacagtggtagcagaagggaaagatatagaagtataaaagaaaactaccttctgtgatatttagatcatagatgctaaacttaataaaatcaaaggtaggaatatattaaatatatttctacctttttattatgtggcgagactccacatccattaacttaaaaattttttatttaacaggaattgtacttgcaggaatataaaagattttacaattaagatgctgcacttaatattgttaacaattatttttgcttatccctcattaaatgtaaactaccacccttaacctcccatgtttttccggtaaaagaataaaatgttaaaaacagttttaaaatgagtttctttttcaccttgtaagctgtagagctttcatatattccccttttctttcaagggccttttttgcatcctcagccgttaatgcaaaatctactgcaatgttctgtaataactccttattagcttacctgaagaaatctcttagttgttgatttgctaacctttcttgtttactatcaatcaataaaaaaagatttttttgttcaagggctactttacaatcttcagttgatggatgtgtgaacgtaccccctactaatattcttgcttttaaaccattactactgtattatatttacgtagtaatataaggattatggtatataaaaaaggaatcaaatctatcagtaagatttaaatccttttccaaggcaaaaagattttgccaaaatctaatataatttatgcttgtctttttaatatgtatctagtaaaaacatatttttttatcaatagaattctgttttcaatgctaggaattagtgttctaaacaaggaaccatacaaagtgatctgaaaaacctgagagttattgtatgtagtttgctcatctccaggtactacatacaataaaagagccttacatctctaggcaagactctactagtttagttgtataatatttacatgataactaagaaacagaaaacatataacaccaaatagcagcaccctattactcctcctacggctaatacctgcttaacccaactcttaaatttttgatttctgtaaatcgcttgcactctttccatatttcctcctattaagtagaacccttaaagactctccccccgctatagtaccattaaaaaatgaataatagagatctaatgtataagtatgcaatattgcatacaaaaatgtattgttataattgtaagcgcttactataatgagattataaagatttatcacatcttaatacgaaaaaagaggagagaataatatggaaatcgcaatggcagttttaaaatttataggtggagcaatcccattaattcaagaacttctaaaagcatttatgtaaattcactatttagcaattatttataaaaattatcatacaaatgatctgtatatcaaaaatgaattgatttacagatcatttgcgtgagcaagttcacctttaacatgactaagggacttttttaatttttaaatacttaaggttacgccacattaacatcaagttagcaaaacaaaaagaaaaatacgccacccttcctataattctacaaatggaatagcatatttttcatttttgggaccttaaaaaactttaacttgatggtgatggggtaacaattctgatttagagataagatcagtttatacaaagattacccaccgatatgtggaagatgaagaatacacttgcgaaattgaaacgattgaattaaaggacttgatgttagtgtggttaacagaatatgaaaatcacttaaaaaatcgtaatcttaactaaaaaacaccaagactgcccctctcctctctagggccatcttggtgttttttacgttcacatacaaattattatttgtactgttacatgggttctttattaaatgatatacgtctactttaccatcgataagcaatgactaatgtctcccatttaatcgtactgattacctatacgaggttttaaaggaaccatcttgactaaaatgataaaacaagaaatcgaaatgagccccttttttattttgtaatctgtaaagcttccattttaggcatcataatatcaacaatagctaaatcaatatgattttcttctagacactttaaggcaacttcaccatttgaagcctctacaacaaaaaaattttccatttctaaaaaaagctttaaaagatcaataatatctttgtcatcatcaacaattaatatattttttttcatactctccctctcatcagccggaattttcaaaaatcattttaaggttattgtaaggtaaatgaaagtgatacgaaagactaaccgtttaatatacgggtatgaattaaaaaaggaggcattatcacatgaaaaaatttgttggaattgcgttagcagctaccattggaattggaggtttaggaacttttgctactactaaaactcacgcagcagtaaacaatcaagaatcaaaaaaatcggtttatcaagtatctgacgtgcaaggtgaatttatgcacattaaagtggggaaaccttggtcaatgacgccaagcggaaaacaatacaaatatgtcttatttagtgaaaacaaaatttatgtaaatcctaaaactggtgtagtaacagcatatgaagaaggagcggttgaaggcagagtactcgataaaaatggaaatgttgttgctatttggtatatcacggcttataaatagtgaagggttaattttaaaaggtcgaaaagagcatctttaagtttattatgagagtattaaaagaatttcaatacttgtaattaccctaaaataaaaaaacttatcttttaacacgaaatgataagcttttttattattcttttcattttttgttttcggaagtatttctttaagttgatagtaatgcggtgttattccatcactatctacaactatatagtatcccaaaacgtaaacaacggattgcatttatataattaggttttggagaattgataattttgtttagggatactttacgattttaacttgaatgacatatagtgttatttttagcattctaaataatcgggttcaatgtatttttctgtttcaggagagcttttaatttctatagggtatttcttaaaagctacaacagtaatcctatcttcttgaactaaacttctggattcatttatagaagagaaacctgttcgcgttaaaaaattgtataaagaggattttgtcatccaaaaactagtaacgttatctaatgacgcccattttgattttaaacgttcttctattgatgagttagcagagtgttctagcattgtgtgtcccttatattcataatttttataaagtactgatacattaggagtacaagtgatatgagtatcaattattacaaaccttttgcatacttcatacactttttctaaaaaggggaatacatctgggcagtctaagtgatataaaataccagagcataaaacaatatcaaattgaccatatttttcagcacttaaatttcttacatcatcttgataaaaagttaagttttccaaccttaataaatctttagcgaatatagctttttgtatgtttgattctcttccttctatccctacaacagttgctccttgcatagcaaactcaatagcgtaatgcccctctaaacaagctaaatctaagattcgaagatttttaaaatcacattgtgtgatatcttgaatcattgtcacaattttttttaatgcaggatttggttgtcgaatatctcttgtatatagagtatccgttaatttaatatcataagcggtccattcaccatatttacgaataatgttttctttttcgagaacaaaatctttcatgatacaattcgccacctttagcataatattatgtgtaatatataccttaataagatcaatatatgtgtgtataacttgtatttagacgaaggtaaacattttaaagcttctcactttatcatgtggtacgtccacgattccttctttttgggagccactcgcaaatttagaacaatatgcagctcaaatagtcaactaattaaactacctattcatctcatctatctaaattatagaaaatcttattatattcatttttagccatagccagtgcaaatgtcataatgataagtgggacaccacattgctatcaagctaagcaaacaaaatactccttaaattgaactacccccactttcacttcgtttagaagtgagggattcctaagtaaagagttctaacgaactctaattgattaggctaaccccgcagtcctttcggttagaagccttatcgcttcattctttagattgatacttgcgttaatatccctatcatggtgtgtacaacaagaaagtatctcatataactagatactcacgggtttataggtaaatccctttcctaaaaaacctaactttatcatacgaggaggtggggataatggacaagacggaaacaagggaaatagtaacacagaagattgaaattagagaagatgataacggaaatcggacacttataggctatgcagtaaagtgggaaaagaaatccgtagttatgggatattatcgtaagtttcgtgagcaatttaaaaatggagcattcacagaaacattacaaaatgatgaccaacgttttttatggtctcatgatacatctaaagtgctgggaagaacaaagaataatacgttacgtttgagcgaggatgccgtgggcttacgctttgaattggatttaccagatacaactctaggtaatgacacttacaaatctattaagcgtggagatgtagatggtgtttcgtttgggtttagcatgataagcgaagaaatccaagaaccagatgatgatttgatgctacgaactgttacaaaagcaaaactattagaagttagcgcagtagctttcccagcttacccagattcagaagtaagtgctaggggatatgatccttataaacattttacagaagaaaaaaagcgctcggaaaagcgcagaagactatatttacaaacattattataaaaggtggactttgaacatgaataaagaacaattattaaaacgtaaatctgaaatcagtgaattattaagtgatgaaactcgctctattgataaccttgatgcaattgaaacagagttacgagatattaataatcagttggcagcgattgagaagcgtgaacaacttttaaatgaagcacgttcaattaatgaaggaaatgcagctggtactaataagattgaaacatttaatacggatccatcaaatgaaaaacgtgaacttggtacaaatacagttgaatatcgtaatgcttttatgaattacgtattacgcggtgaaacaattccagctgaattacgtgcaaatgctgttacgaaaacaagtgacatcggttctgttatcccacaaacagtattagataaaattatcgaaaagattgaagcggtaggaatgattctacctttaattactcgtacagctattaaaggcggcgtaacagtaccaacttcaacagttaaaccagtcgcaacatgggttgctgaaagttctggaagtgataaacaaaagaaaactacaggaagcattactttcaactatcacaaattacgttgtgccgtagcggtttctcttgaagtagaaacaatgtctcttgcggtatttgaaacaacattaattaataatattgtggaagctatgacaaaagcgattgaacaagcgattgttagtggtgatgggtctggtaagccaaaagggattctagcggaaacacctgttgacggacaagcattagatgttgcgaaaattaactacaaaacgttaacagatgcagaagcggctttaccacttgagtatgaagcaagcgcgatttggacgatgacgaaaaagacatttatggaattttcggcaatgacagatgcagacggccagccgattgcacgtacaaattacgggatttccggtaaaccagaacgcattttattaggtcgtccagttgttctatgtaattatgttgatagtttcgcaacggctactgaaggaacaacatttgcattcttatttaattacaaggattatattctgaatacaaactaccaaatgggtgttaagaaatatgaagacaatgaaactgacgatcaagttacaaaggcaattatgattgtggatggtaaagtagtagacaaaaactctttagttgttttaaaaaaagctccagcagcttaataaaggagtgatacaatgaatcatttagtcttgaatgctttcattgataaagaaacaaaagttggatattcaaaaggcgatatgtacgagtcaaatgattcggaacgtgttgcctttttaattgaaaaaggattcttaaaaggaaataaagagatttctacattccctaagcatactggcggtggatggtatgaattatcgaatggtgaaaaagtgcaagggaaagaggaagcgatgtcagctgaacaatcattgaggggtaacgaatcatgattttaaaagatataaaaaaggcattgcgcatttctcatgatgcccttgacgatgaaataaacgatgcaatagaggaagctcgacacgacttaatgttgtcgggtgtttcttctattaaagcgaatcatgacgatgatccgttaatcaaaagagcgataaaagtatattgcaaagcagaatttgttgctgaggtcaaagaggctgaaagattccaggcatcgtataacatgttgaaaaatcatctcactttagcaggtgattacaaatgaatgacattgtattctttccagttgtaacgactactacagacgatttaggacaaatagaagtagcagaagagtttacaagacaagtattttgtgagaaaaaaagtgtttctcaaaatgaattctttcaagctggtcaaaatggttttaagcccaaatgtgtattgattgtttacacattggattatcaagaagaacagaaagtacagtatcacaacaagaaatacaacatttatcgcacatacgaaagagacgatgaaagaattgaactctattgtgaggtgaagacaggtggctaatatcgatgatttatccaatgaaattgctagggaactacaaagatatgccaatgtaattgaggaagacatggaagtggcgaaggaagaggtagcggataatttagtgggtgaattaaagcaaaaaagccctaaaaatacaggtaggtatagtaaaggttggcgaaaaaagaaggatgggaacgcaattattgttcataatgctttaaaaccgcagcttactcatttactggagaaaggtcatgcgaaggcaaatggtggacgagtaccagcaaaggttcatattgcaccagctgaagaacatgcgattcatgattttgttgaacgtgttgaaagggcgattgggcaatgacattaggtgaactaaagaaaattcttgaggctacaggttatcctgtggcttattcgcatttcactgaaacaccaggtgttcccgtaccttcaccgccttatgtttgctactttgtagatggatcacctaacatggcagccgacaataagacctatcacaaaataaatgatgtaaatatagagctttatacaactaagaaggatttagttgcagaagccaagctagaacaagtcctggatgattatgagattccatatgagtcatatgggacttttattgaatctgaaaaactatttcaaaaaatatatgaaacgaggttgttgtaaatgaatgaaaacaaggtaacattcggtttgaaaaatgtacattacgtgccattagatattaaggatttcttagttacatttggtacaccaattccattacctggtggagtggaactaacatttgagccacgcggtgatttaattgaattctatgcggatgacatgctttattacgcagcaagtaataatcagggttacgatggaacattaagtattgctactatcccagaaaagtttgctattgatgcacttggtgaggaattagacgaaacagatggtgtattgaatgaattggctgatgcaaaaggaaaaccattcgcattattatttgagtttgatggtgatgtcaatgcaactcgacatgttatgtataactgttcagcaagtcgtccaacacttgcatctaaaacaaaaacaagttcagctgagccaaatacaaatgaactgaagtttgtttctagtccaattattttagcaccagggggaagacctatggttaaaacaaaaacaacatctaaaacaacgcaagaaatttataaaaattggtacaaggaagtgtacgttaaaaaaccagcagcaccaaaaggagcgtaatagtaaatggaaaagacaattacaatagatggaaaacaagtccgattaaaaagtacagcagctactgttaaacgatataaagcacaattcagacgtgatttatttgctgatatgtttaagttagggattttgtctccttcaaatcctcaagagggttcactagccactattgatttagctaatgcggatttaagtaagctagattttgaagttgtatatgatttagtttggttatatgcgaaaacagcaaatccagaaattgccgaaccaattacatggttagacggttttgatgaattccctatttcggatattatcccggaaattatggatatgattcaaagtacaatgggagcaaaaaaaaaataaacaaaagtaatggagagcaagggacgttcagtgatgaagaattaaccactgatacgttccttgctctttgttataaagcgaaattaacgcattgggatctggacgtcatgacgattggtgattgctttgattacattgctgaattcgctgaaatggagaatccagacaaagaaaaagtcagaaaagcaaaccaaaaagactttgattcattctaagaaaggggttaaattatggccggaaggattaaagggatcaccattgaaattggtggggaaaccacaggtcttcaaaatgcattaaaagatgtgaataaacgcagcaatgatttaacaaatgaattaaaagatgtagaacgtcttttgaaatttgatcctggtaatgtggaagctttagctcaaaagcaaaagttattgacgcaacaaattgaaaatacaacggaaaagctagataaattgaaggcagccgaacaacaagtgcaagcacaatttcaaaatggaaaaatttctgaagaacagtaccgcgcgtttaggcgtgaaattgaatttacacaaggatcacttgatgggctgaaaaataagcttggtaatatgaaatctgaacaagagaatgtagcgagttcaacaagacaattagaaacgttgtttagtgctacaggaaaaagcgttgatgattttgcaggcgcattaggtaatcgtcttgtaaatgcaattcgaaacggtgcagcaacaagtaagcaattagaacaagcaattgggattattggacgcgaagcattaggaacagaagctgatattgaaaagttacaacgtgcgctacgatctgtggatgctgggaattcaattcagcaagtacgaaatgagttgagagatttacaacaagaagctgagagaacagagaagaagtttgaagggctccaagtaggacttgaaaacgtcattggtggaatggcagctggtggcggtattgctagtgcagttgaaaaagcaatggatatgtcaaaattgaaaactaagattgatatcactttcgatgttccagagtcttcgaaaaaatcagtggaagaagcgattaggggcgttagtacgtatggtattgatgctgaagaggcattagaaggagttcgccgacagtgggcattaaataaagatgcttctgacgaaacaaatgccgctatagttaaaggagcagcgactattgcagcctcctacgctggaattgattttaatgaacttatacaagaaaccaatgagattggtgcaacgttaggtattacgaacgaggaagcattggggctagttaatacattattaaaaacaggatttccaccagaacaattagatattatcgctgaatatggggatcaaatgattcaagctggattttcggctaaagaagtccaaggaattatgtcagcaggagtagatactaagagttggaatatcgataacctattagacggtgttaaagaaggacgtatcaaaatggctgagtttggtgcaggtgtagataaatctatgcaagcggttttagataaaacaaaaatttcggcggatcagtttgaaaaatggggtcaagctatcgctcaaggtggcgaaggtggacaaaaagcgatgcttgaagccaccaaagctttagccggtgttgaaaatgcaacagacagaaatgcacttggcacgaagatgttcggtactctttgggaagaccaagggaagaaaattatcgacaccattttgaaagcggaaggtaaacaagtcgatttaaaaaaaggagtagaggacttacagggtgctacttctaaaatagatgcatctccagcggttaaatttcaacaagccatgcaagatttacaagttgctcttcagcctgttcttgaagttatagcagatcttgtctctaaattctctgaatggatttccaataatcctgaattagcagctactttggcagctatcgcagttgctattggtgtaattgcaggagcattcatggctttagcgccaatagttgctgttataacaagtataggatgggcgatgacagggttggttgctattattccgataatagtagcacttgttgtcgctttaggtgttgccatttataaaaattgggacgacatcaaacaatggaccattgatgcatggaatgcaattggggaattcttagtaggcgtatgggatggaattgtacaatgggcaagtgaaacctggaatagtattagtgaatctacatcggaagtttggaattcgattaaagaatacttaatagagttatggaatgggatagttgagtctttatctgaaatatggaattctattgttgaaactactacagaaatatggaattccattgtggagtatttgactggaatatgggatggagtagttgaaacattatcggaagtttggaatagtattagcgaaaccacttccgaagtgtggacagcgattagtgagtttttcgttaatacttggaatggactagttgcctttctaactcctattttacaaggaattgctgatttcttctctatgatttggaacggtatttccacagtgattcaaactgtatggaattttattacacaatacttacaagcgatttggacggctattttatactttgctacgccaatatttgaaagtatcaagaatttcatttctgaatgttggaataccattagttctactacaagtcttgtatgggaaacaattaagaatttcttagtttcctgttggaatgggcttgtagcgtttgttatgccgatttttgaacaaatcaagtcctggatcattgctgtgtgggatacaatcagttcagcaacaacgtctgtatggaatgctgttaagaatttcttacaatcgtgctggaacgggttagtagcttttgtaacaccaatattcacctcaataaaagattggattgtgaatacatggaatacgattagctccacaacaagtgcagtatggaatacgattaaaagctatctatctagcttatggaacgcaattgtttccacagcgagttctgtattcaatagcatcaaagaagcgatttcaacggtttggaacatgattagtagcacaagtagtagcatttggaatggtattaaatctacactttcaaacatctgggaaggtatcaagtcaaccgcatcttctgtctggaatggattaaaagaagccattatgacgcctgttcgttgggtaacagatgccgttagtggagcatttgaaggcatgaaatcagcagtattaggtgtatgggatggtattaaaagtggtattcgtacagctatcaatggaattattcgtatcataaataaatttatagatggttttaatacaccagcagaattactaaacaatataccaggagttagcgcgccgactattccacatgtaccaatgctcgctaaaggcgggaagcctgtaggagatggctcatttattactggagaaaaaggacccgaactgtttactaaaagagggaattctatcacagttacgccgttatcttcaaaagaaagatcactcggtatcactggaactatgaatcaactaatgagtgatatgagccggatgatggctagttcaatgagtcaattatcagggttaaagagtgttatgagtggtgtgtatggaaatatgtcaaatagtagacaagctatggcagctggtgttgcgaatcaagtgattaattattcttcaggatcatctggcggtggagtcattccaacgcttggtggcgatttagttgtggaggttcctgttgttttagagggacgagatgtagcgcgtggtacgtatcgctatacaaccgaatatcaagaaagagaaacacagagggattcagacttttaagtttgagtctcttttaatttgaaaagaaatgaggtggcaacgtgagctcttttacatttaacaatatacgcaaggattttattcaaatcgaaaaaggttggaaaaaaccagcgtgggcgccattaaaacggaactttttaagtgttccaggttatccaggtgcaagattattaacgacagaaactgaaatgcgagttttacctgttccagtcggaattatcgttcctgatggatcagacttagaaacagtaaaagaagaaatagcagagtggttaattacggaaaaacctgttgaattagtctttgatgtaacacctgataggacatacttagcggttattgatgaagattttgattcagaggattttgttacgttaggtaaaggtattttgaactttgtttgcccaatgccttataagttaggaaatgagaaaacggttgattttgaaaatgacggccaggggttaattgccaatgtccaaaacaaaggctctgtgcattccaatccgattattgaaattgatattaaaaagccacatacttttttagatgtatggtttgaagataaatatgcaaaggaaccagattattttcgtattggactgccattaaaaatggagcaattgcctgtagaaagaaatcaacgtcttatatgggatgatatgtccacaactgtagggtggagtaaggttagttctatggaagatggtaatccggttggtgaaatgaaaacagatagttaccaattctattgttcggactatggctcaggtaatggatggcatggggcagctgttaaaaagagcatccctggtggaccagtagaagattttattatgcaagcccatgttacatgtaagagtaaaaacattaatgaaatgggacgagttgagatagcgatactcgatgaaaatagcaaagttctttcaaagattgccatgaatgacctctattggcaagctgaacaaaattttggaacgatggtaattggatatgataataagcctggaaaaacaggtttaatttatgagagtggtgattatcccaatacgtggaatcagtattatggtaggttgtggatcgctagaacgggtaatgattgggaggcgtatatttcaaagtttcttcctggaacagaaaaagatgatgcagagcgttttgcaagatggactgataaagacaataaacatatggaaaaagcagctcaaatacaaattagtatcatgcagtggcaagatgttccgccagtagaagcgatgacagtttctgatttgaaattttggaaagtgaatttaaataatcaaaatacaccaccttatatagtcgatgttggtgacaaagttgtgattgatacagaaagcagtcatgtcagtattgaagggaaaaacgcaattttccttttattatacaagaaataccctatagaatagacttttttcaagtgtctattctatagggtacattttaaacgtgatgcatctctttttagaattataaattaaaagcatttgctagtaagcgataagaatttaatttatgttcaaattgatgagtaatcgtgacaatcataaattcgtcagtattgtatgctttgcttaagtttattattttttcttttacagaagacggatcaccaacaatcatacgttgacgattttcttttatacggaataaatcataagcgctgtatgaataattttgagcagtttcaatagaaggtgtaccagtagttcgttttccttgctctaataataagattgatagatctaaactagaagcaattttttccgcttcttcatttgtttctccgcatataacaaagatggcaacgattgaattaggcttatctcctaaaaatgaaggctcatattgttcttggtaagccctcataacttcagggcctccgaagccgttaataaattgtgcaaatgcgaaagaagctccgttgtttgcagcaattttagcgctctctccgctagaaccgagcatccacatttcaggagacgttgggataactggagtggcttttaagtttgcatagtgatggttttctggtacttgatcatgtaagtacattgcaacgtctgcaatttgttctggatattgatcaagtgagaccattttcccttcttgaagtgcgcgagttgctattggcataccaccaggtgctctaccaacaccgagatcgatgcggttcggatacaatgcttctagaacacggaaattctcagcaactttatatgggctataatgcggtaacataacaccacctgaaccgactctaatacggtccgtttttgcggcaatatgagaaataagaatttctggacttgaaccagctaagcttacggaattatgatgttcggatacccaaaaatgtgtgaatccgagtttttcaacttcttgtgcaagcgtaactgtatgtgaaaaagcttgggctgctgtgctaccatctgaaataggtgattggtctaatacacttaacttgatcatagaatatacctctcaatcttaatgtacatcctattatatatttacttatgaaaaatgcgtagtgaaatgctcaaaatgaaaagcggataatcttatttccgcttttaacgagaaaatccgcgttcataatgattcatttcgactagatttaaaatatattcatagttgtcaatttcatgctttagttgttcacgttctttttcagatagtgtcatattgctaagttttttacataagttttgtttctttaattctaaatgtttttttgtagcatcgtagtcataagtatgtttcatttttaaccactccttctttgtagttgctatattatacgaagtataaagaaaagtgagatctgtctcttatgtacttttagtgaatattcaaattgcaatggtgttatgtttatggggatttatgaataaaatgcactaaaccactaacgtccatttgatgaagtaaggggtggaattgtgcagaaagatataatgtataacactgaaatggatgaagcgttaaaagttatagataaaggattgaagaagacgataagcccaaaacagattattgtagtgggagctggtatggctgggttagtttcagcatctttattaaaggctgcaggacatgatgtgaaaatttttgaagcaaataaccgggtaggtggccgtatagaaacagtgagaatggaagataccggattatatttagatgttggagcaatgagaattccgtattcgcatacattaacgatggcatatataagaaaatttgggctacaggtgagtccttttattaataggaatgagacggatattatatacgtaaatggacggaaaacgacgttaaaacaatatgaaaaagatccaagtattctaagatatcctgtggaaatgaatgaagttggaaaaacgtcagaggaattattattgttagcggtacagcccattataaattttataaaaaagaacccagaaaaaaattgggatattgttgtaaaggattttgggagatactctactggacaatttttaaagtatcatccttatcagtataatacttacttttcgccagtaacaattgagatgattggtgttttattagatttagaaggttttttggaacggtcgtttgtagagactttacgctttctatacattatgcaagaggagagcggattttgtgaaattgtgggcgggaatgatagattgccaaagtcatttttaccgcaattagaagagaatattatatataatcaaaaattaatgaagttacatcaacacgataatggtgtgacagctttctatcggaacgaggaaacttttgaatatagtagtattacaggagatttagttattgttaccattccgttttcgacaatgcgttttgtagaagtagatccgtttgattctatatctcatgaaaaatggaaagcaattcgtgaattacattatatgcctgcgacgaaaataggaattcaatttaaaagccgattttgggaagaacaaggacaattaggtggcagaattataacagatttgccaattcgttatgcctattatccaaattatggaattggggagaaaggaccggctatgatgttaggtagctatacatggtcttatgacgcgttgttatgggatggtttatcaaaaggggatcgtatttattacgcattacacaacttagcaacaatattaggtggtcaagtgtatgatgagttcatatctggaatttcaaaaagctggacattggatccgtatgcgcttggaggatttgcactttttcaagcaggtcaagaatctgagctgcaaccagcgattgtcaaaccagaggggagaatattcttcgctggagatcatacaacgctatatcacggatggattcaaggtgcgattgaatctggaattcgtgtagcggtggaagtgaatgagtaaaaggttttcaattcagaaaattctttactatataacttcagatggatattattatatataaaagaaatatagggagtgtttacagtgaatccgttattattcgattttccttctgaattttatactgacagactttttattcgaatgccgaaaccaggagatggtaaagttgtatatgatgcaattcaggcttcaatacaagaactaaaaccttggatggtgtttgcacaaaaagagcaaacagagcaagaagtagaagaaagtattagaaaatcacatattcaatttttgcaacgtgaggatttaagattactagtattttcgaaagaaacaggtgaatttattgcttcagccggattacatcgtattaattgggatatacctcaatttgaaatcggatattggattgatacaaggtttagcggaaaaggctatatggtagaggctgcgaaaggtataacggattacgctttttctgaattaaaagcaaatcgtgtagaaattcgttgtgattctttcaataagaagagtagagcgatacctgagaaattaggttttaagttagaaggtacgttagaaagtgcgagtgttgcggtagatggaaacggattaagagatatgtgtgtatttgccatgactagaaatacatatgaaaaagaagagctgtaagaaaacagctcttctttttatgcattatggtacaggatgtccattagagctttcgaaaattgtaaaccattgttgacggtctaagttaacttttgtagcaagagcggcagtttttacgcgatctaatttaccagagccaacgattggtatcatattagctggatgagcaagtaaccaagcatacataaccgtatctatactagaaacacctagctcagtagcaactttttgcacagtttcacgtacacgtacggcgcgttctgattgaccagtaaagatctccccaccagcaagaggtgaccaaatcattggattgattcgtttttcttggcataaatcaattgtccctttttcaaaatgctcaagctgcaatgcagaaacttcaatctggttcgtaataagcgggaaatctaagtacgaacttaacatattaaattgtgaaggtaagaagttagatacaccgaagtgacgaactttcccttcttgttttaattgtgaaaatgcttttgccacttcatttggatccataaaaggatcgggacgatgaataagtaatacgtcaatataatctgtatgtaaatttttaagtgatgcttctacactttgcataatatgctctgcactagtattgtagtgagcaacatatcgctctggaaatttcggtgatgggggagcgattccacactttgtaataatttgcatgttttctcgtaaggaaggctttaattgtaaagcttcgccaaataacccttcacacgtatatgcgccgtaaatatcagcgtgatcaaaagtagtgattcccatatccatacaatcttcaatgaaagaaagtaattcttgtttcgtcatattccattctgctaaacgccaaaatccttgaataatacgagaaaattctagcgtttcagccatttgaactcgatccattataagtacccccttgatgaataataatgttttgaaaaggctttcttactacatgttattatatagttaattaggtgtacagacaataaatatgttttgctataaaaacgattttttctatcatgcctttcgagaggactcccatctctaaacgtaaatgaaggtggtgaggtgaattgaaaggaatattttatttttgagaaaaaaacggaaacgtatgttcttttttgctataatatccttaacaaggaggtgaataaaatggcaaaagaaaatccatcaaactataaaactcttcaaatctggataaaaaaagggcatcgtatgtattcttattttcaagaatgttgtcataacgctaagaatatgtacaacaccacaaacttttatatacgccaggtgtacactggattaacacaagaaaaagagttgcagcctttgcaaaaagaagttctggataatattcataaaaatattgggaagatgaatgacacacaacgtcttgtctatcggaagaaattggaaaaagagaaagtaaagcctaaagaagaacagaaagagattacatgtaatttgttttcagaacctaattttgaaaaaccttatgtagattacaactttctagatgcactatttaaggctatgattcaaaatgattatcgagctttgcctacgcaatgtagccagtccatcatgaaaggtttgttccaaaattggaaatctttttttgctagtttaaaagactataaaaagaatccaaacaaatatgatggaatgcctaggattccaaagtatattcgttcttctgaaaaagagattctgtatacaaaccaagattgcatcattaaaaacggtagatttttaaagtttccaaagacgaaattgcaattaaatattgggaaactaggtttcactgaaggtaaactgaaacaagttcgtgtgattccaaaatacaatgaatatgtagtggaattggtaattgatgttccttctgaacaacaaatgattgaagagaatgctcgttatatgagtattgatttagggattgataaccttgcaaccatcgtaacaaacacaggtatgaaacctgtccttgttaagggcaaacatgtcaaaagcataaatcaatattacaacaaaatgaagagtcattttacaagcattcttagaaatggaaaacaaacgaatgaaggaccttttacttctaaaaggatagaaaaacttcatcaaaaacgttacttgaaaataaaagacgtcttccataaagttagtcaccacatcgtaaaactagctcaagaagaagaagtttgtaaaatcgttattggtcaaaacaaaagttggaaacaagaaacgaatatgggaaaaagaaataaccaatcgttttgtcatatcccgcataatttactgattcaaatgattacatacaaagcaaatgctgtaggcattcaagttgttgtaactgaagaatcatatacatcgaaagcaagttttctggataacgacttcattccaacgtatggagaaaatgaccaaaatacaactttttcaggaaaacgaataaagcgcggtatatatcgttcagcaaataaaactttaattaatgcagatgtaaatgctgcggctaacattttacgaaaagtaatcccaaatgcatggacaaatgggatagaggggttaggcgtgaaacagctcgctaatgtgttaactcccctgacgttaatcgtccgttaggtcgaaacgttagaaacccccacttcaagctttgttaagtgggggagtgttcatatgctataatgtagaaacatatagctataaggagatgtacgaaatgattccagtaacaatattaactggttttcttggatctgggaaaacgacattattaaatcgtattttatcagaaaatcacggtaagaaattagcggtgattgtaaatgaaatagggcaaattggcattgataatcagttgattatgaatgtggaagaagaaattatggaaatgacaaatggctgtttatgctgtactgtacgtgaagatttactcgttgctttaaaacagttactggacgtaaaagcggaagggaaaatggattttgatggtttagtaattgaaacgactggccttgcaaatccaggcccgattattcaaacattctttttagatccagtcattcaatctgcttaccaaattaacggtgttgtaacggtagtagatagttatcatatacataaacattttgaaaaaggattagaagcaaaagagcaaattgcgtttgctgatgtcgttttagtaaataaattagatttaattgaagagaatgagaaagaaaatctcttgcatgaaattcaaggaattaacccgactgcaaagttaattgaggcgactaactgtgaggtagatataccatctttattacaaatccaaacgtttaaaatgaaagatacgttgcaaatttaccctcataaagaacataaccacttagaaggtgtgaaatcatttgtattacgtgaagaacgtccgctggatttacaaaagcttaatgagtggatgtcagctgtcgttcaagagctaggggaatatttatatcgttacaaaggaattttatcgatagatggagtagataaacgtatcgttttccaaggtgtacatacgttatttgctgcttcgtacgatagagagtggcaagagggcgaagagcgagtaagtgaagtagtttttatcggaagagatattaataaagagtggttccaagaacatttcgaggagtgtgtgaaataagtctgcgtaaattgcaggcttattttttatgagcattctattagattgcaaaacagaattaaataagggagagaaactaaaaattgataaatgtataataaaaagcctgttttcacaggcttatattttcgtctattagtaactccattacaacacctacaactggaccttcatcatcaatatccccatttaagcggaaaccaaatgattcatacagtcccattgcaagtttgttgtctggatgtaaacttaagtaaattattttgcattcaaatttttcttgtaagaattgaatgagtaagcgaaggaaacgttttgcgtatccttttccttgatattgttggtcaatcataaagcgatcgagccatacacttttatgttttactgaataccatccatacattgcgtatcctacaagtgtttctccatcatataaacctactgacgttccgtttccttcatataatgattctgctaaagaaaacgcgttactttcaataaattgttgctgatcttttgcgacgtctaaagcaactactgaacgccaattttttgctgttacttcacaaatgtgaagattcataattccaactcaccttctaaattaatatagctttaaagctaatatggataattttacttgttattttggtcaagtcaaggataaatacataaaaaggcaactgaataacaaattcagctgcctagaaagtgtaatggattagtttgttgcttctttcaatgtgtttacgttttcttccattaaagtaaagtaatctttattattttttgcatcatcttcagaaatagtagctaagtgatttaagcgtaaaacttttgtaccagtttctttttgaattacggatgctacttttggagtagagaatgtttcgaataaaatatattttagattatgttcttttactgtttttgtaatgtcagcaagctgcttttgagatggttcatcagaagctgaaattccagcgataggaatttgttttaggccgtatcgttgttcccagtaaccataggcagcatgagaaactaaaatttctttcgtttttgcgttcgctacagctgccttaaatccatcgtctaaatcagtaaatttagtttgaagtgctgcaaagtttttttcgaattcttgtttatgttcaggttgtaattctacaagtgcatttttaattttttctgcctgtttcattgctagagtaggatctaaccaaacatgcgggtctttatcgtgatgatgttcatcttctttatggccatctccatgatcatgatgctcttcttcagtagaagcacgaagctcaatacctttagatgcatttacaattttaacattttctttttgtaatgttttttccattttttcagcaaatggttctaattcagcgccgttataaacaaataaatcggcttttgcaacttgtactgtttgtttttgacttggttcaaatgtatgtgaatctgcaccaggtgggtaaatcgcttcaacatttacatagtcgccaccgattttctttgcgaaatcagcaagtgggaaaatcgttgtataaactgttagctttccatctttcttggcattactttcttttttatttgagcagccagcgaaaattaaggtaaaaataagtaagaatgaaaatatagtcaatcttttaggcatgaagttctcctcttttctttttacggatatattttccccaattatagaagaaaaatatcattttaatacaaaacggaataattacgttttagtttgcgaacttagtataatacatctttaataaagttgcaataaataataatcattccgatttgtttttgttataaagttgtcaaatataggtgtattatttttgcaaatgcatgcatatgtgacaacgctgttttcatatattgaaaaggaggtaaagagggggatgagcgcttgggttatttaatggaagctattttattaatattagcggtagtattgccattatctttcgtattaatttttttaagaagattaataagtaatttaggggacgctacacatgcccatcaacttaagaatttgcactacccccaagtgtcaaaaaacgttattctttctaaaaagctagctagaaatttctagctagctttttagaaagaataacgttttttgacacttgggggtagtgcaaattcttaagttgatgggcatggggctataaccgtattgtaatcaaattgaatgaaatgactgggggaagaaaaatgagagtgaaagagcaattgttaactttgagagcgtatgtgcctgggaaaaacattgaagaagtaaaaagagaatatggtttatcaaaaattgtgaaattagcatccaacgaaaatccattcggttgttcagcacgtgtgacagaagcattaacttctttagcgagccaatatgccctttatccagatggatatgcctttgaacttcggacaaaagtagcggaacatttaggtgtaaaagcagaacaactactatttggtagtggattagatgaagtcattcaaatgattagccgagcgttactacatgaaggaacaaacgttgtaatggcgaatcctacgttttcacaatatcatcaccatgctgttattgaaggagcagaagttcgtgaagtatcacttaaagatggtattcacgatttagatgcaatgctagagcaagtagatgagaaaacgaaaattgtctggatttgtaatccgaataatccaacaggtacatatgttgagaaacaaaaattactttcatttttagaatcagttcctaagtcggctctcgttattatggacgaagcatattatgaatacgcggaagcagaagactatccgcaaacattaccacttcttgaaaagtatgaaaatcttatggttttacgcacgttttcaaaagcatatggtttagctgcttttcgtatcggatatgcgattggggatgcgaagttaaacggacagctagaagtagctaggttaccattcaatacatcaactgtagcccaatctgtagcactcgctgcattagaagatcaagcctttttacaagattgtgtgcaaaagaatgctgaaggtttaaatcagtattatgcattttgtaaagaatataacgtattctattatccatcccaaacaaatttcattttcttaaaacttggtataccgggtaatgaagctttcgaacgattaatgaaaaaaggatatatcgttcgttctggtgctgcatttggtatcgatgatggtattcgtattactgtcggtttgaaggaagaaaatgatgaaattatagagttgctgaaagagcttgtaaatgagcaagtacagaaagaagaaacatattcttaagagattgtgaaggctcctagtataggagccttttttatcgcattcaaaataaaggttgaagactgctaattaagttattctgtaaaccacggtttgtatggctcgataattagtgagagaagttatttgcacggtcataaaagaaagcggtacaatagaagatgatggtaaggtatcggtgtcatatccgaaccttttgaacaattaactactctgtaagaagaagtataagaagaagtatgctcattctaaaggttgcgttctaacagtgagttgcttatgataaatgaacagaagagaatattttttagaattaaaggagacgtttatgcaaaagtttgaacaagctgtttcatatattgaaaatggtgaagcggaaaaaggattacaattattaaaagaacaattaaaaattgcgaatgatgaagagaagtatgatatcgctcgttactatcatacgcttggatttacagatgaggcattagcaattactgaagacttacgtttactgtatccagaagaaagtgaattcactgtatttttagcagaattatatattgatctagataaagaagatgaagcgattgaagtgcttcatgatattccagaaaatgacgatttatatgttcaatcgttattacttgttgcagatttattccaaatgcaaggttttgatgatgtagcagagcaaaaactattaaaggcgaaagaaatgatgcctgatgaacctgttattacgtttgggttagcagaattatatagtagtaaaggtgaagaacaaaaggcaattacttattatgaatcgctattagcggaacataaagtaatgggtggtgttgtgatcgcacttcgcctcgcagaaacgttaagcgcgatcggaaactgggaagaagcgatttcttattatgaagcaggcctagaggaacaaaaagatattcactcattatttggatatgcctttacattataccaaggtgaagaatatcagagagcaattggtgcttggcaagaactaaaagaattagaccctgagtacgcatcactgtacatgtatttagcgaaaagctatgaaaaagaaggaatgcttcaagaaagctatgaaacgcttcatgaaggaattaaagtagatgagctttcagttccattttatgtagagttagcgaacattgcggcgaaattagggaaaatagtagaagcagaggaagttcttcaaaaagcgcttgagttagatccagggcatttaggtgcaacattaaaatatgcatatatcttaaaaggacaagaaaagtacgaagagttaattgcaattgtagagcgtgctattgatagtggagaaccagatacacaactactttgggatcttgcgtatgcaaaaaaacaattagaaatgtattcggatgcattaaaacactatgaaagtgcatatacttcttttaagaatcatccagacttcttagaagagtacggttatttcttattggaagaaggaaaacgaaaagaggcgaaagaagtatttacccagttattacaactagacccgacacaaattcatattgaagaattgttatataatttagaggatttttcataagttggaaggaaactgaatgccgcttcttgaatctaaaaagaaaagagaaagacagaggagggacttaattgctatgaatacccctgtttctgtaaacgagaagaaggattttgtaaaatggtttttgaataattaccaactgaaacagcgtgaatgtgtatggattctgaattatttaatgagtcacgaccaattgatgcataaagtccacttcgtagagcatgcaaaatattgtccgcgtggcttagtgatgtcagcgaattgtgtgaaagacacaccgtttcacttttttaaacaaaatgttatgacaacagatgctgaaaaatcgtttcatgatattcgtttaaatcgagatgaggatatttatattcaactcaactttaaatcatcgtttcaaaatgcgaattatgtagctgtattagaagaaaacccatatctaccaaagcatattgaagtaaatgaaaaagatcgtttacttgcagaaaggtttttggaagaaagtgtattttcgtttaggagagaacgccttttgaaacaaattgatgaagcgttagataagcaagataaggaagcgtttcatagattaacggcagagttaaagactttatagaatttatttggattaattaatttttacaaatttcagacttttataaagaaaaactacctatattgggtagtttttctttttttacctcttttagtgtggtttaatatatataaagtgaaagttctgtcatttgcaagtgaaggagggaagggatttgaagtggattgtaaaagatgtagaacagtttgagcaagcaagagagtatgttgatacaggagtaataccgctgttatcaatttcggcagcaaaagaaatgaaaatggttgtagaacaaggtgaatttatcgaattgttgagcacggaattggaaagagagtataaaggaagagtgcttttactgcctgcgtttacgtatttggtagaaagtcaaaagaatgaaaaaggtcgtttgcaagaatggacaaatcatttacgaagtgaaggttttaagcatattgcttatgttacaagtgatttttcatggaaagaggatatgcaagagttacagggagatttattttggtttccttcattagcgttagaacaatttagtgatcaagcaaaaagagaagttattcatgcgcatataaaaaatataatggtgatgttggaagagaaatggggaaactcgcaataaacagaaagttcttattattatgagtagtatgatattgacctgtgcatgagcgtattatatcatgatagtgtcctagtttttattttttatataatttatcacgaggggacaatttctgatagaggggggaaattttcgtgagcgacaaagaacatcgcgtgtcaagaagacaatttttaaattacacactcacaggggtaggaggctttatggctgccggtattttaatgccgatgacgcgatttgcgcttgatccggtgttaagaaaagaagcgggaacagatatggttgctgttgcgcaagtaaaggatattacaacagagccgaagcgtttcgattttaaagtgaagcaggttgatggttggtacaagtctgaagaaccaaaatcggcttgggttcataaagatgaaagcggagacattgttgcgttctctccagtatgtaaacatttaggatgtacagttaactggaattcggacaaagcacatccgaatcaattcttttgcccatgtcacggggggcgttatacaaaagatgggattaacattaaaggtacgccaccccttgctccgcttgatgtgtacgagtctaaagtgaaagatggaacgctgtatctaggaaaagcgaagccaagagggggtgcaaagtagatgttaaataaaatttatgattgggtggatgaaagattggatattacaccaatatggcgtgatatcgctgatcatgaagtacctgaacatgtaaacccggcacatcacttttctgcattcgtctattgctttggaggacttacctttttcgttactgtaattcaaattttatctggaatgtttttgacgatgtattatgtgcctgatattaaaaatgcttgggaatcagtttactatttacaaaatgaagttgcttatgggcaaattgttcgtggtatgcaccactggggtgctagtctcgtaattgtaatgatgtttttacatacactcagagttttcttccaaggtgcgtataaaaagccccgtgagttaaactggattgttggtgttcttattttctttgttatgttaggtcttggttttaccggatatttattgccgtgggatatgaaagctttatttgctacaaaagtagggattcaaattgcagagcaaacaccgctcattggtccttatattaaaacattactcgctggtcattccgaaattgttggcgctcaaacattaactcgcttctttgctattcacgtcttcttcttaccagcagcacttctaggtttaatggccttccacttcatcatgattcgcaaacaaggtatttccggtccactataagagattgctaaattaaaggggaaagaactaaaggagggagattatgcatcgcggcaaagggatgaagtttgtaggagattctcgggtaccagtagctcggaaaccaaatattccaaaagactattctgaatacccagggaaaacagaagcattttggccgaacttcttgttaaaagaatggatggttggtgcagtttttttaatcggttatttatgtttaacagtggcgcatccgtcgccgcttgagagaatggcggacccaacagatgctggatatataccacttccagattggtatttcttattcttgtatcagttattaaagtattcgtatgcttccggttcatttactgtaattggagcatttattatgccagggattgcgtttggagcattactgttagctccatttcttgatcgaggtccagaaagacgtccattgaagcgtcctgtggcaactggatttatgcttttagcaattgcatcgattatctttttaacttgggaatctgtagcacaccacgactgggaagctgcaaaaaaacaaggagcaattgtaaaaacagcgccagttgataaaaatgatgatggctataaattaatgcaaaaaaatacttgtttaacatgtcatggtgacaatttacaaggcggggcagcagcaccggcactgcaaaacttaactttaaagccagaagaaattgctaaaattgcgaaagagggaaaaggttcaatgcctaaaggtgtatttaaaggtacggatgaggaactgaagaagctttcggaattcgttgcaaagtataataaaaaataataaaaagctgactacaaaatttgtagtcagcttttctatttagttggatgaagtttgttataatagagtaggatttaatgaatgaattactttgcttgaaaggtgttggacatacggattggtgtacttgtatgcaatgttaagacaacgctcggtattattatttttattaattgttaacatattaggtacaatttacggatttatatggtacggaaatcaattgaaagaaacgtcacctatattttggccgtttgtaccagatagtcctatggcgagtctcttttttgtctttgttttaattgcttttttggcaaagagaaactggggattaatagaagcgttagcgattgtaactttaataaaatatggtatttgggctgttgttgtaaacgggattatgatttacgtaaaagggcctattggccttatgggctacatgttaatgctttcgcactttgcgatggcagtacaaggatttttatatgctccattctatcgtataaaaaaatggcattttatagtagcagctgtgtggacgttgcataacgatgcaattgattatttattttggcaaatgccgcgatatggaattatgcatttgtttgtagaggaaattggttattttacgttttggttaagtattgctgtactatgtattacatattattgttgcttacgtgagcaaaggaaacaattttctttatgatggttagaacatttagggggagaacatggagaaaaataagagtggtacaaaaatattggatcgattgattactttagttgtttcatatagcatagcattttctatttttgcactcgcaacaacggcagttgtctatggaaaatggctgtattattttgaaattgattttttaaatattcctgatttagcggatatgacgaaggatgaaattaaaagaaattacgatgtgcttattacatatttatccccgttttatgacggagcattacatttgccaacattagatatgtccacaaatggccgtattcattttgtagatgttaaaaatattttagtaaagattcaatatgtgatgtatgcgacaattatgattgcagtgataggcggaatttatttattaaaaaagaaaaatgaaaagtttttactgcacggatcgattttaacaatcatttttccgatagcgcttatgttaccgattgctattaattttgaaaagagttttgtattattccataaacttttatttagtaatgattattgggtttttgatcctgaaaaagatccaattatattaatgttaccagaagagttctttatgcatgctgcgtgtgctattttattattcattttaggtggtagtatactttgttacagtttatatcgatatttcgtaaaaaagaaaaggatgtcacagaaaaaattctctgcttaaagagaatttttttctttgtaaaatgataatatatttttcggtctagttctgttctattcttgtccaaattaacatattttgtactagtagttataggggggaccgggatgaagagaacattaattggattgatagcatttctaattataatgtttccgttacgtatatatgctgaagagtggaatgagctaacagggttgttagacgactcgttacagttagtgaagcgtaatgaagatgaaaaagcggtacaagtattacaacatttctcggagcaatttttaataaaggggaatgaaaagaagcaggaagtaacaccagatcaagttagagttatttctttagcttacgataaggcgcaacaatcgctctctgaagaaggtttaggtaagcaagctaaaattgataatgtgctggcattacaacttgctgttgatgcacaagtatcgaaatatcaaccactttggatggaaagagaaaggaaagtaatggatgccttttctcaaatggaaaaagcgatggaaaaagaagatgctgggcagtttcaacaaacgttaaatacgtttttaaatgaattcaatattatttatccaagcttaatgattgctttgccagaaaacgaggttcagcgtgtaaatgttcatttatcttatttagatgaatttcgtaacgttatgttaaaaacgaaaggcggccaaatgcaattagggattattaaaggggatttgcaaaagatatttcacacagtaaaaaaagatgaaattgcaccctctctcatttggtttatgacaattactgggggacttattttcttcacattaacttatgttggatggagaaagtataaaggagaaagagaaaaaagaaaaagtaatgtacattctaaaaatagataatgcaataaataaagatatggattgtaaggtttattcattgacaatagtggcagaagaaaatagaatgagaagtactataattaaaacttcaatggaggttcatgatgttttatttaatttacttcgcgatcataatgatcataccgttgtatgcacagtcaagagtacgtagtgcctatagcaagtattcacaagtttattcaacatcaggtatgacaggagcggaagtggctcgaaaaattttagatgaaaatggattatacaacgtagctgtagaagaaacaccaggtcatttatcagaccattatgatccaaccgctaagacggttcgattatcaacagataactattatggacattcagttgctggtacagcagttgcagcacacgaagtaggacacgcaattcaagatgcaaaagattataaatttatgcgcgttcgtcattcgttagtgccagttgcaaactttggttcgaatatgtcttggattttcgtcctaatcggtatatttgcacaaatgtctggtttgttgttattaggtatcattttaatggcagcaggtgttgtgttccagctcgttacattgccagttgagtttgatgcgtcaaagcgcgcaatgcaacaaattgaagcgttaggtattgtatcaacagatgaatatgggcaagctcgtaaagtattaaatgcggcagcattaacatatgtagcagctgcagctgtagcggtatttgaattattacgtctcgtattaatgtatactggtatgcagcgtagcgacgactaaagactatcaattttgaagtgcaccccaattgttagacacataactaacaattggaggtgcattttttatggctaaattttcttcaaaagaatacaatgctcccataaatacagatggccaacttgtattaaatcatccaaatccatattgtttatttctgcaatctgtccagctcttgcgatacttccaaattgttgcttaactgctgcaatcactaaatatttcttttcttcaaataattcttctgctgtcatttccttttaccatcccttcttgtttttaaatgtaatagtttgctatactataagagcattccggttacttaactcactcctgttaggtatactgttctagactgatattgccgatgagaagacctaattttaggtcttttcgtcattctaaagcatttacatgaagataattcagaatatatctgatatactgtttatgatgaatgtcagtgcacgaaacaagtagtatgacctatgtacagaagaagtcctattttatagggcttttttacttttaacagcactcttcagaaagcgtattatgatgcgccctcttcacaactgaagcattgatacctctacttttcaaatgttccacaatccctagaatgcttttacgatcccgttcaagttgggtatcatatttttctttctcacggtatagcgctataagctcccgtcgagccaatcttgcttctttaatccaagtacaaagtaacaatggatcattcttttgaatcgcctctatttgtttcttttcacaatgctccaagaattcatctagtatttgttttttctgtatatctttctttaaaattgataccgtcatagcgctttctcccctcaaattcattccacatcttttgtaaattctttaattggcttatctagtgcataaacaacaagtagaagtccacagatcagaaacccagtgatacatactgaaaaaacactttcttccatcatggttatttcctccttccaacttttttacatctcagaaaacttaatttgagagtttactatattaattttctcactcagcacaataggtaacgtatacgctccaacaatctttgttgcgagtgccaaatgaccacgtttaattgctttatggcttgttactccaaattcacgatataactgattatagatatcacggtagaccttacctctaatccccgcatgttggtacgcattagactgtttaccacctaatagcgcaacgccatgacgcttgactgcatttgatatttcatcgcattctacagcaaataacggcgcattttctcgtaagtctttgacatctgatttgatgtgctggagttcttgcttttgcccttctagcgcttcaaaagtaagctttaaaatactcattggatctgtaggcacttgttgttgatattccttggctctcatattgaaataaccatcaacaaattgatcatataattcccatgcagtctcatcttcgagaatttttaataactttgcatatcctcgttctgatagaaggtatatgttattagattttgcgatttgcatatttgaaaagccaagacttaataattgtggtgggttaaaagcaccactttttaaatcgagaatatcaattccgtccataaaacggatacgattttcattaatacgacgattaatttcttttattggcttatcatgaatgatggcaatttccttaactaacatagctttcttacctttgccgaacccaccctcaattccggtgaactgataaccagcaatatattgttgtcctaaaatatttaattcgtttgctactgttaattaatccatataataccctcctcatttttaatagtgcttgtccatcctatgcacttggaatgactcgtattgagttcgtatgacgatgcactaaatgtagttcgccatctaccttcttaaaaattaaccaattatcaggattcaatttgtatgatttaaggtgcattttttcacgttttgtcaattttttaccgtttttcattaaaattcccctccagttacttcgcaaataagtcgtctactgttgttttaaaatgttgtgcgagtaattttgcttctgtaagagtaaaatcacgttttcccttttcctttaggtaatacgtttgctggcatatgtttactaacttcccagcatcctcttgcgtcatacgatgttctcttcgaacaataaataggtttttatacatctctatcatcatcctttataaacttttcaattggctcatccaaaaaacaaactgctaaagagactatacaaatcacgattgcaactatcattaatgaaaacgtgctttcctctatcattttgttatcaccttttttcagttaccttaagaattttgttttttcttttggtaataatctcgcatgtaatcatttcttttatctttatttttctgataccaattgcgattgtaatcattcttaatttcactttcttccatattcattttctgcgccactttcttccaatatcgttcctgagttgctttaaccttttctttattagctgctctccaggctcgcatgtaagccttttttgcttctcgagcagataagtctttttcattatccacactatatacctccctaaacctttgcaacaagcaaaggttttgataataaaaacttgcttgttgcaaagtatttgtttatctttttctctttatttttcttttgttaaacacattgtacaattaaatttgcttgttgcaaagtatattttctaaaaaaaataaaaaaacttgtctttaagcaaagttttattgtacattatatataacaaagagagaaataaacgtaaagttaaaaggaggtttaataatgtctgaaactatgggtagtcgtataaaagaggttcgtaaatctttaaaaatgaaacaaaatgaacttgcagatgctgtcggtgtaaactacacaatgatttcgctatatgaatcaaataaacgtgaacctagtagggaaacggtagaaaatatagctcgtgttacaaacgtttccgctgattatattatggggctttcaaagcataaaacttttgatgaagaaacatcaaaaaaaataacagatgatgttgaagatatcatgaaacgtattaatcagcttcctgctgataaacgaagcaaaattataaatatgatcaatgatctataaaaaaagaacttggcagattaacttccaccaagttctttttttattttgattattttttcaattgcttcttgatctcctttatatgcaagttcaactaactcacttattttttctttaacatctacctctacagtgtttaacattaaaattcctcctattcattttaatcaaaaatcaggcgacacagttttacgacgtgtgattttatttgtgtcactccttaaacgcactgaaagccgctaccgaagtagcgactttcttttttatagtaactatattaacttccgccgggatcagtcatcatatactgaactggatttgttttttctagctgattaacttctccaaataatccgaatcctaatacccctacgcacattaaaagtgcaattaaattctttttcattgtagcacttcccctttgttcattaaaatatccttacataactgtccataaaaacttaaccctgctaattcaaattcgagtagagcttgtttaattccttccatatcaccaatacattttgaataagaaagacgttgaaaaggagtaaatccttttcttttcatctgttcaaacattgaaactcctaactctctatcaccatagttatattcataattagcctgttcattttcatgaattaccgtaacatcaatcttatcaatgtttaaattgttagttatccttacatgcgccaatgtagtttgaaaagctatatacttttgagtttttacagggacattaacttcttctaattttttaatagattgttctaggaacttttcagacataatcggcgactcgaactggtaagattcaccaacgcaacataatgatgtcgctttgacaattggaatatctagggaagagttaattattttataacatgtttccctacattcatcaagttgcactctccaaagatacatgtatgcttttctttcatttgctagcatactaagataatctttaatatgaccttttttgattttttttaaatttgcttctacagcgtctacatattcaataatggcgttattattcggcttatcagctaatgctagcatatacagtatatttaccatcacctggcaatgtggattcgaagaaaaacgccgcttgttcaattcatcgtgcagtgcctgtccttttaactcatttttattcctcttattaaaaagtttatatatgctaaagaaaattcctaaattctttttactttcatgcttttttattaaatgttgcatcagattatattcaccttgaacctgacaatatattaaagccacttcaatgttagagatactttcacacatactgaaaaattctcttatgatttttcttttttcagttggatgctcaaataaaatctcaatggattgaaaaaatactgctacatccatttcatattcacaagtaagtcctctcctgaatgtttcacgacttactttgattttctcagcaaaattccttcttgaatatccgcaaaattctattcttttcaacaactgatccattacatgttgcaaattcacttcccccttctccgaacataaactttccatcctaacttatttttcaataaggaacattgctaatgtatgatataataagatggactcatacgaggcaagtgtttcctaaggtacggttagggaacggtgtaattgtggtcacaacacttgtacacacgcttctatgggtctatatttatgttcaataatattattttgttaatttcataaactttcgaaactgcaaattctcttccataattggatatacgcacccaatataacacaatcccctttaaaataattgtcttttttgattttttcaacaattgtttctctaaaatgacaattgtttcccattcctccattgttttgttagtatatttcaattttagtgatacaaaaccagccattacgaaaaatccacacccagccaattattaaattttatctctttcccaaaaattagcttttattttttatcaatattaacagatagcactatatgataatataaaagtatcctttctgtttttatcaatatgatggtttaataataattgagttcccttactcttctgttattaaaagtaagatggtttaatttcgtagacatccttatttggatgtctttttttgtgttttatagaaactgcaataatgcaattttgcataatcaccaaaaaatacaccatgtacataatagaagtagtacaataaaaaacgtggatacattctataaatcagattctcttattattaagagcgtaatatgtcaatcgcactagtgacatagcgtttatctaaatatttacctcgcttctttttattgtgtgtgctaacaatctggatttaaagatgattctgttttataggttgtgtttacatcctgataaaagaggtacacctctatttatttaaaggaatattaagctgaaagaaaagacactttcatattgattgtgccttttctttttttgtacacgctgatatactattcatacaaggacctttagctcagttggtcagagcagacggctcataaccgtccggtcataggttcaaatcctataaggtccatttggtttttaaacgtcatatgttataatcgaatttccatcacaaaacgtcttagttgcttcaaacttctaagactagaatccgttgcagattgcagcggattcttttattggactgactccttttattaacaaatggcataacataaaattagccgtttaccaatggttatttcttcaaacttaaatccattattaagatgttctcattgggacatcttttcttttggtaacaaacaagctataatctattcaataaattgaattatcactctttatataaaggaggaacccctatggtgatctataaggatgacaaacgaggtacatatttcttcgtagtaagagtccgtcagtttgatgggacaaccaagcaagtaaaacgtcgtgggtttaaaacaaaaaaagaagcacgtgaagcagaagctaaaatgttagttgaaaaagaatcaaactccaatctaacatttgagcacgttgcagatagttatttcaattggtatacgcagaggaggaaacaatcttcaataaataccataaaaaatgccatctacaatcatttaatgaaagaatttggaaaaatgaaaattgactgtatcacacctagacatgtaatggactatcaaaacaaaatgatcaatgaatactctgcggaatatttaaaaaaattccacactacactctcagcaatatttaattttgggataaaatttcatggtttaacaaccaatccagcaagaattgctgggaattttcaaaaagaatcaaagaaaagaattaacttttgggaattcgaagaatttaaacagtttatcagtgtggtagatgagcccatgtataaagcattcttttcaactctttattatagtggagcaagaaaaggcgaactactagctttaacttgggaagatataaatttcgaagaaaagaccattaacattcacaaaactaaatacaatcgtcaagttacagaaccaaaaactaaagcttctaatcgaattattatgttacctaactttgtaatgaatttattaaaaagtataaaaaaagatgctgcactaacagcaccagttaaaaatgattatgttgtttttggtgaattctatgatagtctcgccacaacttcattacataaaaaattcaacaactatctaaagattgctatggttaaagagattgtaatgcatgagtttagacattctcatgcttcttatctaataaataaaggtgttagcccgctggttgtagcccagcgattagggcattctgatgtagcaacaactttaaatacttatagccatttgtatccttcgaagcaagcagaagtagttgcgtttatggaaaaagatttgctataattgttaccaaaccgttaccgattaactataaatcgttgatattacaactttagaaaagaccctgttcgtcaattcctttttatctgtcttatttcacacttagtttttctttcactttcgctggaagctcgtcttttttcacttcttcccaagctgttacaccttttttatctgagtggtatacgcgtaggaatgcttctttacgaagatttttttgagctatgaattctaattctttctctttaccgtctttatcaaagccagtcagcttatattcataatctttaaatttctgcccattactagctttactatcaaattcttttccatctactgtaatttgaacataatactcatctttacccatacggtttaaatcacaaccaactaacaaacttgcaaatacaactaaaatactaaatagtgcaatgtatcttttcatttccttcacctcatatgttttttcttatattcttatcttaaagcccggagcttaaagaagaaattcaaaaacatgacatgaacattacacttttgtaagataataattatttcttcactttagaaattgtcattccattaagcttctgtataacgtttttgtttctcacgctcatcagctacactaccgccaataacgtctttcacgccaatttcgccacttatcacgtaatttccttataccgtttattacgccttctattatgccctcaattataatctctattacaagatatctcactaaactaataataggtttaattacgtatctccctataaattcaagaatatcctccatcatattttcctccttcttttaaaaggaagctgctactcctccgcgtccagttacaatttctgccctactgcggtatatatcaacaaagataatacgacaacaacatccacgataacgctattgaatttggaagaaacttcggtaaatactaatactgtagttaacatggctaagagaattattttttcacctatattcggagatgctcccaaaaactttataaaatcaaagacaactttactacaattcttcccgtaactaatttattatcgtggtaaactgtcttccactatatccgtaacagttccattcggttcaaagattacacgtaatgatccttctccaccataaccagtatagtcatatactgaataagatttatatttctcaatcacatgtggctgtccaattgcagcttttacctgattcgcgggcataccttttttgattttcaaataatgattgtaacttactgctgccgaattgttatttacatctttataccacggtacacgatcgtttttttcttcatattcctttacaggctcttcactacgtttcgtaaatacctgattctctttatctttatctttatcctttatagcagtacgttcaatatttacaacgtaaccatatgtatttaattcaaccataatttcatatgtaccatccgtatctttttcagtataaaatacgcgtttttcatggttattataatgttttatgttctcaccaccatagtcaatcgtattaagaatatccgtatacgtcataccttcctcaatcttttgagattcatcatgagaaatataacgcttttgtgatgatggtgcatcctcatttttaatactttcacgtttgctcgtagtcataggtgttttcttctgatcttttagtacttcaccttccgccttcgctggttgctttgctcctgcttttgttaatacgtctgtatcgctagaacaagctcccaaaatcgatactgtagtcaacgccatccctactataagtactctcttaaatgacttcactctaatctcccccggtggtttttaatatctagtaatcaatgtattttaattaatacggaagtattcagttctatacaattggctataaccttctccctcatgccccttttttgtataaagtgaaactttaatcagccctcgccaatcatcctcgttacaaatattaacattaaatataactaataaatagtatatttttgctaattatttacattttttctacataatcttatcttaaaatgaacaatatgaatctcgaattcacagcgttaatcatatataccatatataataacatttaaattaaaatctaaagtaaatttacatgcattttctgttttaacgcaaaaagaaaaggcctttctaacgatttgaagtgcaccccaattgttagacacagtctaacaattggaggtgcattttttatggctaaattttcttcaaaagaagtccggttggtcctgttgctcctgttattcccgttactccgatcggtagagctgtgacgtactgtaaagctacatcgtctataagtactctggaactcccggcttgtccttctttataaataagtaaaatagctttatttgctaaaggtggagactgaggagtaattagatatatctctaaccaattactttgattgccattcggaagatgatttaatggaatacttataattaagccttgttccaaaaaaatagaattataataataagcaagcttaatagaaagcggaggacttggagcacccccaattttagcaagtgaaataagaaattcaaaactttcatttggaggtatagggattgcttgtatgagctgagcattagcttctcccccaattaagcttgcactatagatgcccgaatgactatttgtattaacaacttgcacgtttgttgtaatgaatggggcaagagtgccactttcaaagcctccattcattatcaagttagtaatcaaaaaatcacctctttaaaaaaataatttacaaataaaatcaacttctttatgaatttatatataaattaaaacttttataactaaaaatacatcattcttaaattttcctaacaaactattttgtagtttttatacaatcaatcacctcatttccctgatgtattaagagacaatattaaggaataatacatctgtatttattgtaatattatcttctatggttcaataagtaagagtgacaaaaagaagaagctaagaaatatttcttaacctcttctttttgtagattactttggtttatagtctgctttaaaaattacctaaagtaatctcatatcaaaatgttttgaatgtatacttacatttccgattttaaggatgttaggagaattggaatggagttactattttcgttattgtgaaagtaaactaatatttttaaatttacattagtgaacaaaaaagtacgaagtcaactaaaagacttcgtaccaacaacagactaaagtacagttcataggaaactgaaagggtatttcatctatttattataactcgcccattcatatttctaggaattaattattaaatatgcatagttccatatttaattgtctttataagtaaaaaaccaattcttctgtaataggattggtttttttgtatgtaatttagttattacagcaaccggaactcgtatttttaaatgtagtcttatcaatcttattataaaataataagtaaacataaaaagactccttatatataaggagtcttttaaaaggatacaatccctttaggtagatagtgatgggtatctattataacatatttttttataaaagatgagtaatacaaaattgtaattaaaattagttggttatggtacagcagttatattagcatgtatcattgttctttacatattaatatgtaagttaaattaataaattatataaattatataatttattaattttcatcattgatggaaataataaacctagttcattgaaaaacaacaatattacttttatacctaaataaataacgctagcatattataatccattttctctaattcatttggtatatattacaaattaaagtgcagcctaaaaaataaaaatgtagcatatagaagggtgatcgtgtgaattttatttggcaatctttaattttaattcttgctggaattcttttattaagaattgctggaagaaaatctatatctcaaatgactttagcacaaactgttgtcatgatttccattggtacgattattgtgcaacccatcgtagaaaaaagtactataaaggctgttactagtgcttttatatttgtagttacagttatacttttagagtattttcaattaaagtctaataccttcgaaaaatttattactggtaaatctaaagtggtcattgaagatggtagacttaatattgaaaatttaactaaattacgtttgacagttgatcagttagaaatgcgtttacgtaatcaagggatttctaaaattgcagatgtaaaaacagcgacacttgagcctaatggtcaattaggttatgaattaaaggatgaggcaaaacctttaacggtaagagattttcacaaaataatgcaatcatataatcagtctctagacgatgtacataatgaacagagagaaagtaataatatatttcaagaagtaaaaaacacaagcaaaaataaaaataaccatagtcataaagaacttaaataaaaatggttctaacataccttacttaaaggatgaaaaatacaatcttaatggggtattcctagcttgatggtgatggggtagcgtcaggaaaatgcggatttacaatgttaaggaaattcccatattaaaaagccaaatttctcaatatttatattgaaaaatttggcttttttcattactttgtaaaagctccctttaattgaataactaaacaaatttaaacgcacctatttgtataagtaaaattattcgcaaactcttcgttgttttttggttcgctatttatctataacaatcgataatttatagtttgcatattcgtttaattctttcagaaattgattcattaattctatggatggaaatttacattcgagaaggtaacaaccatctccactgattttataattatttattaaatatttgtcttgcgtttttatgaatgacaaataaggttgatgaaaaatgctttctgtaatgattgtaataaaagcatgtatataacagcctaatttgactcgattaactttaattgtataaccctcaataactccttgatcttctaatttcgccactctagctgaaacagctggtccagtcaaatggactttctcacctaattctttcatcgtgaaccgactgttcttggatagttcatctaagatacgtttgtccgtattatctaacatttatataactcctttcattaataaagtaaaacgaccaaaagactttatttaatctgtgtatccattattgggaataatataaactatacattgttcaaagaaaatctcaaaaaaaaggagttaataaatatgaatatacatcaaattcgtaatgcaacaatcgttgtagaatatgcagggaaaaggtttttaatagatccaatgttagcagagaaaggaacttacccacctttcccaaattcaccaagacaagatcaaaataatcctttagttagcttaccagtacccgttgaaaatattattaataatatagatgcagtcatcgtaactcacttacatttagaccactttgacgaggcggctcaaagaatattgccaaaagacattaaactatttgtccaaaatgaagaagatgcgacagaagtaagaaacgccggtttcaaaaatgtagaggttttacaggaagatacagtctttgaagggatccaactacttaagacaaaaggcgaacacggtagaggtgaaatactaaaacttgctggtttagtatgcggtatagtcttcaaacatcaaagcgaaaaaatgttatatgtagccggagatacggtatggtatgacgaggttcaaaaaattctcgatacacataaaccagaaatcattgtcgtaaatggtggagataatcaattctttgaaggcggttctcttatcatggataaagaagatatctacgaggtgtacaaagctgcacctaattcccaaatcattgtagtccatatggaagcagtgaaccattggaacttatcaagagaagaattaaaaagctttattagcgaaaaaggaatcacttcgaccgtttcagtaccagatgatggccaatcatacacgttttaaatccaattttcgttttgaggaacagccaatttcttaagttgatgggcatggggtatcgccaatcgaataacataaaacctaagctaaataaaaaacaatttcctagtaacaggaaattgttttttatttagcttttaaatcgtagttggtaatattttattatataattagtaaaaaataagatgaaatagctaaaataactgcaataactaagagtgataaccatacaattaatgtggtatgtgctcggaatgttttgacgtttaattagatattgtaaggttgcaataataatacttattccagcaataacggatccaattcctattccaatagcaatcttattatttaatgaggaaagctcttttcgaacagctaaatgaaaattagctacaagaaatcccaaaccagcaatagcaattgcagtacgtaaccaagctagataggttctttcattagctaaatgctgctgaatatattttgaatctactgtttcaagggcttttgacttcactttgtgttgctccattacatcgactcactccattaatcagcagtatagtgtagatgtgcatatccttttttacgtctataccacacaataagaatactacaaagtacgcacccaattgagactaattgagctattcttatatgggatgttaacatgagactatccgtacgtaagctttctacaaaaaatcttcctacagaataccataataaataagtgaggaaaatttctcctcgtttcaaatcaacttttcttaatacgagtaatactatcacacctgtaatattccagacagactcgtataaaaaagttggatgataatatgtaccatttatattcatttgattgataataaaatctggtaaatgtaacgactctaaaaagcttttagatacaattcctccatgagcttcttgattcataaagtttccccaacgcccaattgcttgcccaaaaagtaagcttggagctaaaatatcagcgattttccaaaaagaaaggtttcgttttcttgtaaaccatatagttgttagtacagctcctataataccgccatgaattgcaattccaccatgccaaattgcaaaaatttcaactggattttccttataataattccattcaaagattacataatatattcgtgctgaaataattgagataggtaaagctaaaaagattaagtcgtaaaatacatctgaagatattctgcgttttttcccttcacgagtagctaagataaaccctaatatagctcctataccaataataactccataccaatgtacagcaatgggccctaggtgaattgcaataggatctaagggtttaatttgttctatcattgaaaaatgccccccttttatttaaaatgtttaacaatatatacattttagattatttttattataacattgaaccttatcaacatataaaccaccttttctattatccgtattaaattacaaatgatattatgagagcattaattatcgttacatcgtaacaaaaacgaccatttttgttacggttattattaataaacttttagtctaatgaacttgcatactgagtgtaacaaaaatatgtaacaatattatttgtaacaatatctccatttaatcgtttttggtacaatagtcggtgaaggggatgataaatatgaagtttggttatatgcgtgtttctacattagatcaaaatttagatcgtcaaaagaaacagcttgaagaatttgaatgcgaccgtattttcttcgaaaaagtaaccggtacaaaacgaaaccggccggaattaaatagtatgctggaatttcttcgtccagaagatacagtcgttgtaaccgatttaactcgattatcacgttctacaaaagatctcattgaaattacggaacgaatttctcaaaaaggagcacacttgaaaagtctaaaggaatcatggctcgatacaacaacagcacatgggaaaatgttgtttactattttcgctggtattgctcaatttgaacgagatttaacttctgaacggacaaaagaagggattgaggctgcaaggaaacgagggaaacatcctggaagaccaaaaaccgatgaggaaaaggtagattacgctttatatcttattaatcaaggtatgagccgtacagatgccgccgagaaagctggtatctcgagaatgactttgtaccgtaagatgcaacagtaaaatacatatagttttgattttagtatagtaggaggaattacattgacctcaattgaacgtacagcctatccaaggtttaaacgaaacttaactcgaaaagagctgaaagagatttataccgtcacatatgaggagaaccaatttgcccatagagtagcacgtggaactattccggtctttagccttttagttatgctaaagtctttccaacgactaggttattttccacgtccaaaagatattccatctgtgataattcatcatatccgttcgagtttgcgtatatcaaatgaaaccgaaccaaacttccgaacaaagtccatatatcgacaccagaaagcaattcgtgagcatttgcaagtattgccctttgggaaggatgctttacatattgctactaatgccatatataaagcatctcaagtgatggataaccccgctgaccttattaatgtttctattgaagaattaattaaggaacgttatgaattaccagcattcagtacactagatcggcttgcacgtcgagtgagaacgctggttaataatcgtctttgtaatacaattctcgcccgtttgtctaatatagaaaaagataaactcgatcaattacttcatacgtcaaaagaaactcaacattctggttataattattttaaagaagttcccaaaagcccttctattactcatatgaaagatttacaaaacagactttcatttattacgtctttccttccaaacattcatgatttattagaaggcattccaatttctaaattgaagcactttgctgctgaagcgaattctttagatgcttcagaaataaaggacttcgctcctcacaaaagatatatgctgttgttatcaactatttatcggtcacaaattacaactagggataaccttgtagaaatgtttctaaaaaggatgggaatcattcataaaaaaggaaaagaagaacttgctcttttgagggagcaacatcgttccataagtgaaaatcttatttctgtactgagtgaagttttagaaacaacagctatgcatgatgataatacacaaattggcagcaaaattactgagctatttgaagctaaaggtggtatagaatttttaaaacaggactgtacagcaatatcctcatacaacggaaataattatctaccacttttagaaaaattctataagaatcatagaaaaacattatttcggctcatcacattattagaaattgactcaacaactcaagacgattccctcataaatgccctggaatttttattagagaacgaaaaccgtaaggttgaacatctacctagtgatattgatttatcattcgccagtgaacagtggaaacatacaattcgcgttgaaaaaagcacaaatttactttaccgtaaacgtcttgaaatctgtatattttcttatttagcctctgaattaaagacgggagaccttagtgtaaaaggttctgagaaatatgctgattatagacaacaattacttccatgggaagaatgccaaccgatggttgaagattattgtaatgaactagaattaccttcctcacctactgattttgttaatcggttaaaaatttggctaacatccgctgcaaaaactgttgacctaaactatcctaataatggacaagttatcataactgaagatggagaaccaatcctgaaacgtttggtacgaaaagagtcttccaagagtagtaaaatgttagaaaaagaaattatacaacgactaccggaacgaacgattcttgatatactttgtaacgttgaacactggactcattgtacaagacatttcggcccattttcaggatctgaacctaaattagagcatccaattgaacgttatattattacttcatttggatatggctgtaatttagggccagcccaaaccgctaaacatatgcgaaatatagtaacacctcatatgatttcttttgtgaatcgtagacatatcagtgtccaaaaattagatgcctcaattcaagacattttaaatcaatacaacctctttagccttccaaaactatgggggagtggaaaaacagccgccgctgatggaacaaaatacgatttatatgaagaaaacttactgtcagaataccacatcagatatgggggctatggaggaatagcttatcatcatgtttcggataattatattgctttatttagccattttatcccctgtggggtttgggaagctgtttatattattgatggattgctaaaaaataagtcagatatccaacctgatacgattcatgctgatacacaaggccagtctactcctgtctttgcactttcttatctattaggaatcaatttaatgcctagaattaggaattggaaagacttaaaattctttagaccaagcaaacatattcaatataaacatatagatcctttatttagtgatgtaatcgattggaagttaattgagactcattggcaagatttatttcaagttgttttgtctataaaagctggaaagatactaccctcaacacttctcagaaaactgagaagtgatagtaaaaagaatcgactgtaccaagcatttcgagagctaggcagagtcattcgaacgatatttcttcttaaatatatctcagatatgaaattgagagagcaaattacagctagtacaaataaagtggaagcatataatggtttttcaaagtggttattctttggtggggatgggattattactgaaaatgatccagtagaacaagaaaaacgtattaaatataatgatctcgttgccaatgcagtcatttttcaaaatgtcgttgatattaccatgattttatggcaactcaaaagagaaggttatcgattctcacgagaagatctggtgatgttaagtccatatatgacgaaacatataaaacgatttggcgattatgtgattgatttacaaaacattccacaaccaatagaagagaatatacctgtataaaagataatagggtcataacatggaaataaaaaccagtctatgacccatttttacacgtatctcggctgaacccccgtaaagctcaggaagaagctaaccgtaaagctcaggaagaagctaaccgtaaagctcaggaagaagctaaccgtaaggcccaggaagaagcttcacaaaaaagtaatgctgttgtttcctcatctagtggtaatcataacggttctaatcggaaacctttccaaaatgatcctagtgatgacaaagaagccaataccacttgtaaaggacaaattaaaggaaatgccaattcgaaaaaataccatgttcctggtggacaatattatgattctacaaaagacaatattgtttggttctgttcagaagctgatgctcaagcagctggttatgtgagatctaaaaaataaagtcaattacattagaaaaggaaacactctataagcgttcccttttctaatgtcaaaatattattatccatttattaatagcgaataataagctacaccctattaagagattaaatataagctgctttacaagcttgtaggacagcttgtaaagcagatgaatttttaccatataagtttgttgctatacgaatacaaccctcttttaattctttaaaatcagaaataatatttaactcatctgtattcacataatacaagatattaaacatcttatcttcttccaaaatctcttttctctcttgcttttcttttaactctaacatttcaaattccccgttattatttatttctattctcctattatccctatacataattacttaggtatagctccctttcctcctgttaaaaaaatatattttgatcaaatctttaaattgaaaaaagaggttattgttatacaaattacaataatacatactacttgaatctcaacaaatataaattgatagaatattccgtcttatattgataaatgctattaaatagattttgatagaggaaatttctgatatgatactaattgctgcataatatctttggagaggatgaaattgaacaatgaatgttcatatacaggggaacgagcaaataactcatttattaaatgaatggtatcaagaaattagggctaggcatgtagacgccgctcaattacttaaacaagaaattgaaaacaaaatccataatatagaagaaaatcaaacgatattattatactactcactactagattttaggcatcaatatttaattgatagcttaagtatttctaaagatagctttaaacaaagtgatgcttacaaaactcctacagacgatttcctttcatactattatcacttctttaaagccattcattccaatgttactggcaatcatagccttgcaaaaatccattacgataaagccgaatacttgttagaaaccatacctgatgagattgaacatgctgaattccattatgagttagccattttctactgtcatacacatagatcaattttatgtattaatcatgtaatgaaggcaaaagatattttttcaaagcattctggatatgaattaaaagttgccttttgtaataacttatatggattagcatgcactcatttaaaggaatgggagttagctgaggaacactttatctctgctatggatacattccaaaaagaaaatttagaatacaatattttaattgtccgtcacaatctaggatttatgtacgctacacagaatctatctgaagtagcattaagatatttatctgaagttaatcaaaaactacctagcgattataaagccgtattcattgaagctagagaacattataaattaggagaacatgaaattgctcaagaattaataaaaaagggcctccaactctctactcaattgggaaccgaaggctatattcatcactttaatattttagaaaaaataaatcttcatagttgtgctaatgatttagaaaaagctgttttagaaggaatttcttattttgaacgagaagaactatatgagtatataaatgaatataccgaaaagttagcagtccaattttacaaagaagataatcatctaaaagctagctattacttttatgaagctagtaaagccaatgaaaaaaactttaaaaaaggagcattaaaatgaaaaaattagcggttagcttacttggtattttaattgtcgttacagtaacttttggatcaagtccttcaacaggcactcaaagtactgtaaatattattaaatattcgcacggacatactggataatgaaaggaaggattacaccttcctttcattattttttagaatgataaacgtatctcctctacatctatctataaaaatttaagaaataaataattcaaaaggtaaaataaaatactacaattaaaaacttccatttgtttcttttcgttggttttccagcatgttgtatataaaaaaaataaggcaatacctgccatagtaattaaaaacatttgatagtaatcaatcatctgtaataccccctccatacaaaaaataagaagtctctttttaagagacttcttatttttaatacaaacgacatacataggctaaacacatacaataaagtcaggatgatgtactttattgcctttttatcataacatataatttgtaatttttgtttaataatcccactcaatgaaactttatcaaccttaaaatgttttatgataaaaaacaaatacaaataaaattaataatatattcacttgatgcagacggaatattctcaaaagatatatagttcggttacaatatcattcatgattttttaattttttccttcccttctgttaagaatacttcaaaacttgactgattaccttatgttaatactttatatatgcaaaattacatactaacccttattgaaaataattctcattgtaactataatggtttcagggattgaaattttcactttcgtttcaaatctcacaatatattaaaggaggaaatactattatgaaaaaattgattttagcaggggcactaggaattgcagtattttcaggtataaacttaccaggggctgaggcatcaaaagcgagtgcagctactacgaatttagaaattcaagaagtcacaaaatactactctatgagttcctatgaagtgtctcaaaaagaatcatttaatcttaaaaaaggggaagaacttacagtctttgtacaaaattcagggttcccaatttcttatacggtctttgatgcggataatcaagtaattggcacattcaatgctaattccccatatggtcgcgtatttaaagcgcaaaaagacggtaatatttctgtacaatttcaagcaggtgtaaattctacgtacatgaagaagatgaattttacagctaaatttgctgtttctaaacttaaccaataataaaaaatgtaacgatcctctttaaaaacaaattaaaaaggtatatcccttcaatgggatatacctttagttttagtgaattttatattgaccagataactgctcttgcgccatacgaactaaacgtttcgtaatctctccacctactgaaccattcgctcgtgctgttgaatctggtccaagtgtaacaccaaactcctgagcaatttcatatttcatttgctcaattgcacttgctgcagctgctattaagatttcgtttgaattattattttcgcgaatttgcattttttaaacacctccgttgaatttggtaatatcatgctctatttccaacaaaatatgcaaaaaaattattcgtttagctattttacatatatacctaagctttcatcccttatgtgggaataaataaaggtataggtcataccctatacctttaccttcttctatcctacttacttttaaattcccctattaacccctgtaactcttgcgagagccaatttagagaatttgctaactctgcaatatcttgtacatatagttcttgctctttcatacttgtctccacattactactactattcacatatgtattcgcaatgtgtgataattcatttataaactgaacaatagtttgattatctgttagaatttcacttgaatgattcgaagtcgctttaatttgatttgtaacagattgtgcagattctgaaatcttttcaaaaaaagcaccactactttgaacaagtgttattcctacttctacttcctttgaactcttctgtatggatcttacagctctctctgcttcagcctgggtttcaccaattaatttagctatatcccttgcagatgcctcggttctttccgctaatatatgtacctcgtccgcaacacctgaaaattcttcccccatctctccagcacatgaggattcagtagaagcatttaaagctaatgaatttgtttgatttgaaatggttgtaattacagtaagaatttcatgaatttccttagatcgtgcttcgaatgcataaatactagaagatacatcctgaactgtatcttggattcttttcatttgattcacgatttgcttaatcaaatcttttccctctacagaatgctgttccatgtcttccaaagcattgccaacttgttttgcagctcctttaatttctttcatcttactttccatttcttgaacaatccctaaacatttttgcactacatattcatgagaatgtgctcctaaatttaatcctgtaatagcacttgcaatttctttaaaggctatgctattctcttttgtacttaccgacaattcctgtgaagatgtcgaaacttgttcagcagtctcccttactttatctataatcttattaaactttttaatagtgttattaaaatagatattagttatccctatatcatcagatctttcattcaatttaatacttaaatccccttcaccaactttacgtaacccttcttgtaaatcctttaaaggcgatagagagtttcgtgagataaatatttgaattgtaattgcgatagttaatgaaattataataaatagtaaaccttgtatcataaagtttttctttgtaagtggaataatagaagcttccaaatccgctgcaacaattgcaattatatttttattttcatctgtaactggctctaaaattgttacccagaaccctaattcatcttcatacacttctgtcatttgtgcctgttttgtttgtattactttatcatatgttttcatccaataagtaggctgctcatagtattcacctggttttacagaaacagtatttgctaattctgtatccaaagctactatttgtaattcagctttttcatttagcttggctcctgtaacatatgtttgtccaacacttttcatatcttttatagatttatttaattgctctgtcaatttttctttcttcactctttgagctgtggggtcttttgctacatctcttactatttctagatctaattgatttaataccgcatcacctgtttcaaaagactgcctctcaaatatagacatcatactattttgaaacatattaaaacttaacgctcccatacttccaacaagggtcagaattactaataccgttagtaatacatttttttgaagtaacgatagcttatgccaatattttttcattgatttctcctttcttattttcaacaatacaaaaacaaagtagtaacatattaagaggtgctctttctgttattaatttaaactttaaaatggcatactaatcgttcaactaaatgttccaatttttttcatttacaattgcatcttttatatgtccagctgctcttggaaatctattaaaaggaagacgtaatacttctaccacttcatcttttctatttgtactgatttcttctaaatcgatgatattaaaggatttgcctataataattgctataatgttttatagacgactaagaatatttaaaattccatatttatctcctaaagattttcaaattagatttgttgcagtaccttcagcaaggattttttataatatcgttagttttaaataaagataagaatttttaagagcctcatctttagttatttttatcttgcagaacaataaaatctgaaagtttaattcaatctcctattttataacttttccccttatttttctataatattataatatttacctgtacaatctaaacttagactcttttggcctttactcttcaagtgtcttaaattcatatgaggtagcgcagaaagtaaatttttaacaaaaaacttttgtattaaaaaatgcaaaaatacatactcctccaaaactatatgcacttaaatattcatatagtaaaataaacagtacaagcgtgtcctatacagcatatttccttaactggcttgatattatattcatcataaaattggtgtgaacttaatatctcacttagctctttaatattttaatattaacaatatagtgttaatatatccctactttatcgctacacctacatataagccaagaattcaattacagaacggttttcatcaatagtagacaaaaacatgtcaaacaaaaagagactcaattatttattacttttcgtatagatgtaataaaagattataggagaaatatatatgctcaaaaaaataaatagatttatgtttgctttgcctaccatttcttttatttttcttattttattaggatcatttttatttgtaataccattagatctattcttacctgaaatacaaaaaaacccaataacagaagcacctcttattcttcaagttttattaggggtattagcggcacctatatatgaaacaatagtttttcaagtatttttattttggctattaagttggattccttacattaaaaatcacgattaccttatcatattaatagcttcaattatatttggattaaatcatccatatggaatcacttatatagttggtacaacgataattggtcttttatataactatgcttattgggtatataaaaaaaagaatgaaaaatatcaggttaccatgtctgcttttggggttgtttttttgattcacttattacataattctgttacttttatagcttcaaatttatcattttagccaagaagactccttcctcaaggagcgtaaagggtcaaaaagccaatttaaatatgtagaagaaatgaatgcatttgcttgtccgatggggtgtattttagagtatgcgacaacggatcgtgaaggatatcatcaatataaatccaacccagaagactacgctgtttgtccgctacgtgaggtatgtttttcaaagaaacaaaaagttatcactcatcatatatgggagaaatataaggatatcgctagaaaaaacaaactaacagttacagggaaaaagttttacaaagtacgctattcaactatagagcgaagctttgcggacgccaaagaactacatggctatcgatatgctcgatttcgggggctgaagtctgtccaaatgcaggcttatctcaccgcaacttgtcaaaacatgaaaaaaaatagccctccatctgaccaaaaaaggtctggtggagggccatttttttgaaactctattattttatattgtttttattcgctaaaatcaaaaacaaactcatcttatgaccgcgtttcttcttacgaaattaagtaattgtttcaatagctggttttttagtcatagaattactttatctctcagctttattattctgttctttcgcctaaaattccaatatccccattacttccttcgtaaatagtttgaaatcagttaaatgtttttcaataatttgacgaacaatatctaaatttacactttgataatcatgaacagcaatattacgaaatccaaccatcgcctttaacttatttgctagatcagcgctaaggaatcctgctgtaaccaataaatcaaaggcctctcgactagattggggtagtcctaattttttcccagcaacaatatgcattgctagatcaatactcgcttcacaagctctttgtatattcaatattattgaatcttgttttgtaaagtcctctaaattttcagggtcatttccatacacatcttggattctttttatacaacgctctattgtagaaattttatttaaaataacctcattcttcatatatagaacctcttttctttatatcatcaaatactacctgtcgttcttcattcaattttgaatacatttttaaagttttcatttcaaaaataaccttacgtttttcatcggaacaaaatattgtctttcctgtatgtataatctgagcttgaaaaactgtagaagcttcggataaatcaactaaatcaacatccctctgaacaatgttagctaactcctgtgctaataaaaaacgttcatagttccctaatgttgtgtcacttacataagctatatcaatatcactatcttctcgttctctgttctcagccgttgatccaaacacaattatccaatagggattcaccgtctcttgtaatttttctataatagctgttatcatgctttgaaaaatcatttaattaatcccccttattgtacttgaattttattatatcataaccaatcataaatcctttaaacgactataaatacgtaaacaaaattaagcttttttagtacttaactcctcacaaaatcagaagcttatttctgacctaaaattattatagttcaggagtagatatattgtagctttggatcttaaataattgttaataatccaacactttcctgttaaatgccttttttattttcttcctgcaaaattaaaagactgacaataactgtcagcctcttactttaacaactctaaagaactttcgcctatttcacaatatacattctaatagtttgaggatatattgctctattgaactacccccactttcacttcgtttagaagtgagggattcctaagtaaagagttctatcgaactctaattgatttctagctagctttttagaaagaataacgttttttgacacttgggggtagtgcaaattcttaagttgatgggcatgtgaggaaggggtcttcttggctaaaatgataaaaaaagacaaactctccaatgtgaggagtttgtccaaaaccatgatttctttagtttaacaatatagaattcagttccgataagaatctttcttttttccatatcccacggtttttgcatcgatactaacaatagtggattagaataatgacttaatacttgctaggacagtaagaatacctataataatgacaaatacattgctagatttccctttgtatttagcaagtactgatactttatggattgcatacattggtagtatacataagatagcagcaactagcggaccgctaagggcatcaatgattccaagaatacttggatttgtataagcaacataccagcatgttaatacgacaaaagtaagaatcattgtcttaactgttttttctcctatatctttcccacgttttttactggacttgataatcatgtcacgcattacctcatacgctcctatataatgaccaaggaaagactttgtaatagccacaaatgcaatgataggagctgcaatagtgattactggcgaattaagctcattagcaagatatgataggattgacaagttctgttcttttgccaccttaagatcatttggagtcaaacttaaggtactgctccaaacaaagaacataacaactacgaatgtcataatataacaaactttttgtatttgagcacatttagcatcagtagcatctattccatacgtagctctctgtttcataacaaatgacgaaatcataggcgaatgattaaacgagaatactatgattggaagtatcatccatatcgttcctaaatatcccgttcctgttgaagcagtagaaacagctgaaaaactaagcattgacgtattccactgtggaatcaaagatattgcgataaaaagtagagaagctataaaaggatacactagcatgctcatgatctttacagttatatcttgaccaaaatttagtatagcgataagaccgagtactaaaacaagcgataaaatggaccttggaggctccgacatgtgcaattgatgcacgataaagctactagcggtatttgtaagtgcgaccgagtacatcagcacgatcgtataaatggagacaaaatatacaatattaaaaatgatacttgccttatttccaaaatactctcttattgtacctgtaatcccctcatcggcagagttcgaagcgtaaatcattttagcaagcgccctatgtgaataatacataacaggatatgcaagtatggtaattaacagcaatgataataaaccacctgaacctgcattaatcggtaaaaagagtactcctgctccaattgctgttccaaaaaggctcaatgcccaggtagtatcctgtttatgccactttttagggtctagatatttctcattttttactgcagtgttatcagcttgaaattctatgttttttgcagtattcccatccatataataattcctccttgtgtcctattcttaattctctttttaagatataggaatatagaccgttcttgaaaaatgaatagcttatatagtgccccacaacgaatatcccccttctaggttaataaaaatcaaaaaattagcgaagcatcaacctgaagggtttgttaccacttataaaatattttaattatatagtagtatattttattgataacttccccaatatacagacatccttaggcgaacaatagagtaaagattgttaaaaacttcacaatatattcgataacttattgatttgattgtttctccccaaagattttatttttaatggaaattcctgtaggtgtagctgcaataccacctaaacctgtctctcttaattcgcgaggcatctgtcttccaactctatacatggcttcaatcacttcgtcagcattgatgagattgtttacgccagctaatgcgatgtccgctgctgctaaagcatttgccgttccaatggcgtttctctttacacaaggaatttctaccaaaccagcgaccggatcacaaactaaaccgagtaaattttgtaatgcaatcgaaaaagcttcagaagattgctgtggcgttccacccgcagcttctgccgcagctgcagccgccatcgctgaggcacttcctacttcagcttgacatcctccatacgctcctgaaatacaagcgttgtttgcgactatcgttccaaataacgctgaagtgaatagaaaatgaatcatatcttcatgacttaactgcaacgtatctttaatactaaataggactcccggaatcgtcccactcgcacctgctgttggagttgcacaaatagctcctaatgcagcatttacttcattaacaccgatagcactttgaatccctaacaccatcaaatctccagaaagagttttcctattttctcgatagtttttaatttttacagcatcccctccggtcaaacctgttggagaaaatacaccgtcgccctcgatacttttatttattgcatgttgcatagtcgctaaatttcgttccattttactccatacttcttcataagaagttttagtttgtttgatttcctgttcgattgctaattcataaatttgcttttggcttttattagctgcatccacaatttcttttatggccatatacatatttttcactccttaatgtgactaaagaataataagattagctatattgcttaaatctcctaattccttctgagcattacctggcaatatcgaatccaaagcgaatgcatataaatattttgttttatcttccaaactatgaaagttgttaatttccacatcatattgtttaaagatcctgcgtaaaacaaattcaaagtcagctctttctgaaatcgcaataacaactggcaatggcccctgcagatttaagctaaatccatcaatttcaacatttttgacttcaatcaacccaccaccgaccgaaacacccattactctaatacttcgactttcatcctctgcatatacatctgccgtatttggatgaccagcaggactattacccaattgttcaataaaggtaatgtcaattcccttagactctgctattttaatagcatctggcactttgctgtcatcagcagctaagcctaatataccagcaataattgcaaaatcagttccgtgacctttatgggtttcagcaaatgattcataatactttaccacaacttttttaggaagaccttgaaataatttattagcaactgttccaatagccaaagcacctgcagtatgtgaacttgaagggcctatcattatgggcccaatcacatcaaaacaacttttgtatttaacaatctttttttctttaatagatgctacattcatgttcatataagcacccccataatttattatttttagctgtagttgaatctaagttattagaatgatcgattcaaaacaagttttgtttgataacgctttctttattgagttgaataaacttcccttctaatccgctatcctccgtatagtaatcatatcagtatgtccaattttaaaaaattactggcaagttctttagaatttttaatccaaaacgaggtttgatattttctctagaggtaataaattgtgtctcgacgccctcattataacttgtatatttataagtttaatctttttttattttcagaaagattgaatagacagaattttgaataggtaataaattacacttagtatgtagcaattgtgtcctttgtttgaagctgtattagttagtaaaaaagcaaaaataacacagagttcctttcataaacacattgattatattgaaaaatcattataaagatacttatattgtcttttgtttgaacatcttattttgaacgggaaacctgttgcaataaataattcattcatatgaaaaggaatacattataaaatttaaaaacgtttcagtatattaattatacattttgtataaatattaattatcaaaaaaaactaacttcttattaggatcttaacataaaggatacattccaaataacaatggaaattctgctttatcaatttctttatacgttatatttccctctttacctgcaacagcaacttgtactttttcatttgttttcacatcctctgcacctattgcaccacccgccaataatcctgtacttaacagactatcgtgaacgaaagttagagagttatggaacaaaatataatgtgtatgtacatacatttcttttaaaagaagttttgtagtatgcaactgaattaaaaaaatatagatttttatgactctttttaggggatatagcaaagtgggatcttttatatgcacattgctataccgaactagatttcagtatagtatttttttgcaactcattgatttttaccaaacacgtataaaaaccaacaatatgaaaataaacgactggctaaaattttactttcaataaaataaaaaagaacctgcaaatttgcagattctcctgataatgatttatatgagtaagactcggaaatataatacaatgattcaaaaataagttcaagtaaattcaaagaacccgctggagttcgagttctttcagaagtgatgatgttttctaggcttagcaaagtgagaaaatacaagaatataatacatcgagatttagagaatttcaatatttaaattagaggttattttaatgtgatgtaacatcagcattttgaaggaatagcaatgaataccttatacattcccagtctacataacgctttattatcagtagaaagaaaaaggaaaatccctactttcacaataaatccgccttgctactctattcattttttgatacattcctatccaccgttttaggcttctcttttgtactgtgttagccgaaaaattgtataaatcataattcgtttttcttccacctgtttcaccctttttacaccctagttttacaaaataagaagtcatcaaaacttatatttattactttctgttatctcctctctcttgttctatgcatagtctatctaaatttttattagctactaaaaaaaaatttacaggacgattaaaaaaagccaagtgcattgcactcggctttatggtcgattaaacaattttacttcagacgtattaaactgatgtagatagtctttagtagaagtataacctgaattcatgagtgttttcttttcttcttctgtgatatcaaaattaaacgacgacgtaaagaatgtattaataaatacagtgcgggcagcatcttctttggtggtttttccgctctcatgacctttaatcatggtttgagacaaattccatgcaaaatgaataagagaatggccaatatgatgttctgttgaagttgcgatatgttttaacatggcaacctccgcctgagattctaaacggaaaccaagtgtttctttgttgtagacaatttcatctgtaggatcaaagaaagatgcattgtatttcgtgtgtaagcttcttagtgtagaatgatcctctatattgcttatcagtttattaacctcgtcaatcgtatctgtggtcgtgaagtgttcttctttattcacaaaacttttccgatcaaataaacgaattgggtagttatcgagtacacctccgtctacataataatctttatcccattccacagatttaaaaaagaatgggatggacatcgaaatccgcacagcaactactaacgggacatcaggtgtcgtttcgcgagaaaacgtacgaagttggtgtgtagaaacgttcgttccttgaaaaaacacgtcttttcctgttttgtcatacaactgctgaaaagttgtgtccttactccctgtccacttttcaacgatctttcctacccactcagtgaagaaatcccctttatagataccaaaaccatcaaaaaacaaacgaatgttatcttgtacaatcgaaaaatcatcatctttaaacgctttgaaattcatgtctttgtggattttcacaagatctgcgaatggaatggaaagacctaaaagtaatgcagtaatcgctccagctgaagtccccccaaatcgttgtatttctggtaaaatcccttcttcatttagtgcacggatagcacctatataagcgcttccctttaccccgccaccttcaaatactaagttacgaaatggatatgccattatatacctccaatcaagaaattttcgatctgttatagtatcggaagtatattgaaatatattccaaatggtattaagaaagtttcatgtcctccgatacgtatggccgaattatctttattcaatggataaattgtttgaaagggaagaaatttgcttgaaatggtaatttagttggataggaaacaggaaacggagcgcatctttggatgcactgaataatatccccttttgaaatcgtatataacgtaacttcttttccgatgcattctccaagtaaaatcacgagtaagaaatcaaggaacaatctacatttcataaatccctcactctctttaacatacaatccagtgaaataatttgtttcaaatacgtagaaatatggtttaaccagcaatcaatgatcaggtcttcttaccctaagtaaacctaaatctgtttgtctccatacagaaagtgataaatagttttgtttctattcaaatagtacaatatatgcaaaattacatatctaattaattgcttttaatgttatattttaatagcgatgaatgctattatttcataagttgtcaacaagcgttatgtatgtatgagaaaaaggaaggagccaaataggccccttcctttttctactaattaactaaattactctctggtaaaaatttaaatagtaatgctcatttatagacgtctgattatgcattaaacatgctagctttgcttgctgtcggaaaaattaaagacgatagtcaaatatgtcctttcattactttatattgaaataaataatgattcaaagttattttgtgaaaattacacaaaaaataccaattcgtcgtttacctaacaatagataatatagataaagaaaaaatactaaaggatatcacagtgtagtagtctctagtatcttttcatagtattttagcggctatgcaatacggagggataaaaaaaggacctcttacggaaagataagaggtcatcaaaaagataaaaatgttgtatttgaaacacgcgagtttctaattcacatcataacacaatatatttatatattcaatatatacattaaagataagtaatgtatgttcaaaaaacacatggaatattaatttgtaacagtatatattttcctcttttattctatttcttctacaatgccgtgattgtaacaaatatccctctttcttttttggatgattacgaataaaaatactacatgttttctgtctcacttggaataaagcatcatggtaaaaatacaatgctgacaagtaaaatacttaatacaatcaaccctatccctaacatcatccattcaccctttttagaattttaaaatttagcccttcactttcatatacttctcttttacatgagccaataagtccctcagcttattctctgaagggtgttcttgattttctggaacttctctgccataggatgaaaagttttgtgagcatgcactagttgttactttcaatttcgcgtatgaggatgtacgctcatcataactggattacgtcttcttggggataaaggggacaggaaagttgctaagctagcgtaaggtgctaaattccctcaaattatctcaaaatttggatactcatttaatatttctatactctccaacttataacaaaacacatcgcaaaatatttttacgatgtgttttaaaagggaaatcatcatcaagtttttcacccatatttttataaggagttttaccattgaggataaacgccttcatttcaaaacagttcttttcatttgtatacgatatgtctcacacatatagtatacaaattattacacttacttttcttcaccgcttgcttgcatggaattaaaagtccaatttaatttcaacgcatctccttgtacagcttttgcttgtaatttctcaccatctacttttgttaagcggaacgatggaatagatgcagtactttccccaagataacttgtaatttcaccatctacattgttatatacgattactgcctttgcgcctgcttccttagcatgcttaatatttattgaagaaaaggtgatgcatacaataatcaaatctaattaacatattatttaattatcggtagcgagattaaagagactccctactctcaggaagggacctccaattcatattattccccctatttctatgtttcttatttgattctaattaactaactgattagggttattgcaaatcaaaataataaaaccacatctccaattattagataactatctaatacattggaggtgcggttcacttaggtcattgatgtttcagctattctctttatttgaaaattacatctaccatattaatttaatattatattcctcaagccaactattaacttgaagtaaataatctattatacctcgtgcatcattacctgaaattacttcgtcttttccttctgcaatagcacgaactctttctacattaattaatggcaaaataggtgattcaggattgttcaacacatgacaagctctttcttcatggcaggtagtttggcagagcatgtaccataggtcaagccttttcctgtctctttgtatgcttgatcccataaggataggaaatgattgaatacaaagcgagaacacccaatcgttttgttgattagaattgcttgtgcctgatttggatagatacgaaacttataggctttattcatcattatttgattcacctccatttcggtatatgactattatacaccaaacgtacattcgataggtagtggagtaacactttctgtatgtcgaacaattaagatggcttcctgccatcccttgttcgaagccaattcatctcccccctactcactgggctgtgccctccacgctccttgaggaaggagtcttcttggctaaaatgataaaactacttatcttattaaattaagtagttttatgaagtatcccagtttatagagcaggataattataatttcaaaatataaaaacttttagccattgttatttcattacctatgtttagttctgtaatcccagttttagaataagtctttgttgaagaatgtatacaatagaatatcaaggttctattagatgaaattctgaaaagtaaattacgtacagtgctggagatagaaggttttttaaaacggcaaaaaattagattaacattagactgtgtgaacaaattgaactataaataagcagctgcactagtaacagtattaaggcttattttgctactcttccatataatgcttctagaagctttaatttaaaaggaattccatttctattcgtacaaaattgacactcctcccctaaagtggccaactaacgtcagtaggattcttgctaccaaaggccaaatccatttcttgtaccgctgaagtgtaaagattgcggtgtgccatcaccaatcccacaacagaccgtatagtttcgtaggctatggtactgtgatcataccgtacagattgttggttctcaaatgtatttacgtcttttgcatgactatgaataaagtataccttgttttgctatacaaaaacgatgagttcatcccaagtctaaagacggactaaagtcctgcgtaggcttttctataccgtaaattctgtgaacggtattttaaaattgtggtaacatgagcctagatataatatattcaacaaatatcttaggatgcatgagatataggacattcctttggcaaggaagtctctgcccttaatgaccgtgaagcgtctcatcctagtgaaagggataggtaataattattgttcttaaaattctgaattttatatattttatttatacaaagtaatttgttacttattttatattttattgttagaatggataccaagttgtaggaggtgatttacataattaccaatattatcttttcaattttagaaatatggaggagggacgagattgttaagtaatatttttttctttgattagatttagtaatatcattaaaatttatttttttgtatatgataattaaaaaataaaaaaggatacacataaaaaggagatgctaataaatgaaaataccttgttttgttatgcgtggaggaacgtcaaaaggattattttttttagataaacatttaccttcaaataaatcaattagagatgaggttattttaaaagcgttaggggcaggaaatgctcgtggtgttgatgggatgggtacgttagatcctttatcaaataaaattgcaattattcgaatttccactacaccaggaatagatattgattatttatttttacaggcggatttaaagagaaggatattagacgatagtgtaaattgtgggaatataattgcagctgttgctccttatgcagtagagagcggattgattaaagtcgggtcaggaaaagaaactataacaattagaaatttaaatacaaatgtaattgttgaatcaactatagccactaaaaacggaaatgttgtatataacggagatattaaaattgacggtgttccgggtacaggagctccgatagatttgaattttaaaaattcaatcggctcagttacagggaagttatttcctacaggtgcaaaaacggatgttattaatggaattaatgtatcttgtgtcgatgtatcagtgccattaattataattcgagccagtgaattaggaattataggaaatgaaagtccagatgtgttaaatgcaaataaaacatttttacatgacattgatcttattagaaaaaaggtggcttgtcttgcaaatttaggtgatgtatcaaataaggtcatccctaagattgcggtaatttcaaaacctagggaatctggcactattacatcaagatattttattcctcaccaatgtcatagcactcatgcagtaacaggatcgctcgcattatcagcagccataaaaattaatggtacaactgcataccatgttgcaaaaaataatgatttaaataaaatgaaaaaattgaatcaaattataatcgaacacccagcggggaaaattcaaacagaatcagttattgaggagtcatctaatggatatgtaattaagaaatctagtattacacgaacagcaaggttactttttaaaggcgaattaataataccttgatcaatgcattgtttttcttgatatagttttaatggcacattttttaagcaccgagaaatttaaagaataacgtttctcggtgcttatatttattaaggaggcttaaattaaatggataatcttaaaaaagcgacattttttatggttctttcaggaattagcttttcactttctggattttttgcagaacatgctattatatcaggagatttctttgtaactttaacagcaaggttttttattccttttctattcttagtcccttttattataaaaagaatggggaaaatttcattttggagtaatagttataaacaattacctcgagctttttctattacattttcacaggcattattttttttatgtgcagctaaaacctcacttttcatagcaatggttttatataatacaggtcctatttttatctgtcttattacccttttttcaaagacgagacgtgcgacaagagcagaaatattggcagcatttgtaggtttttttggagtgtttcttgttttaaaaaccggtggtattgattatgaatcattcctttatttgggggtaggtttactttcaggattatccttagcattttcacaattttttttacatagaagtgcacagacggatgataatctatccattatggcctatacatacctatatggaacaataatatcgggtgtactctctgcatgtttttcaaaggggaattatattggtgtatttacgaatagtacaatggtactagtatttttatttttaatggcaatgggaagtttagggaatcaatggtttagaggaagggcgtataagttaactacgagaatttcaaatttatctgcgttgttatatttaaacattttgttttcactgttactagatatattgtttaataatagtattccatcagttattcaaattacaggtgctatttttgtgatgggtagtgctgctattccaattatagtacgtgtaaataaacagcaaacagaacaaagaagggcagcaagttcataaaaaatagagtagataaaaggtttccttccacaaaaacatgtagcagttgtgaaagatatgtcattgtctgaacaagtatattcttgtatatacggtgcaaatcttcatagagattatagtgcagttattaacaacaatgaagcaataagcctattagcatgaatattaataaagtagcctttggaacaagagatttagttcgaccgtcttaggatgaatttcttagctattaaaagcaaagactaatcgagatgaactcacttcgaacagtttgttagaaagccaagtggcgaatagtagacctgacctagattcgaatattcattaaatttaggatgttatagagaaaaacgttatatttatgtatatttttggaagttcctgtgttgtaattcactttgtgaagcattctaaagttcatctctttacagttttttaccttattattctctatgtataatactattgacgaagagagtgtatatcctctcttctttttttatcattttagccaagaagactccttcttcaaggagcgtgaagggtcctagcccagtgagtaggtgggagatgaattggcttcgaacaagggatggcacacagaaagtgttactccactacctatcgaatgtacgttaggtgtataatagtcatataccgaaatggaggtgaatcaaataatgatgaataaagcctataagtttcgtatctatccaaatcaagcacaagcaattctaatcaacaaaacgattggttgctctcgctttgtattcaattatttcctatctctatggaatcacgcatacaaagagacaggaaaaggtttgacatatggtacatgctctgccaaacttcctgtcatgaagaaagagtttgtttggctaaaagaagtggatagtattgcgattcagtcgtctgttcgtaaccttgcggatgcttatacacgctttttcaaaaaacaaaacagtaccccgtgttttaaatctaagaagaacaacgtacaatcttataccacaaaacaaacaaatgaaaacattgctgttgtaggaaacaaaataaagttgccgaaactaggtctcgttcgatttgccaaaagtcgcgaagtaaaggggcgtattttaaatgctacagttagacgtaacccttctggcaaatactttgtgtcattgttagttgaaacagaagtgcaagaacttccgaaaacacaatcttacattggaatggatgtgggactaaaagatttcgccattttgtcagatggaaccatctataaaaatccgaagttttttcgatcattagaagagaagttggcgaaagcacagtgtgttctttctagaagaataaaaggatcttctccctggaataaacaacgagtaaaggtagctagaatccatgaatacatggcaaatgctagaaaagattacctggacaaaatctcaaccgaaatcatcaaaaaccacgatgttatcggtatagaggatttgcaggtatcgaatatgttaaaacatcataagttagcaaaagccattagcgaggtatcttggtcacagtttcggaccatgttggaatataaagcaaaatggtacggcaaacaagttattgtcgtatcgaaaacctttgcttctagtcaattatgttcttgttgtggataccaaaacaaagacgttaaaaatctaaacctacgtaaatgggactgcccttcttgccgtacacatcatgatagggatattaacgcaagtatcaatttaaagaatgaagcgataaggcttctaaccgcaaggactgcggggatagcctaatcaattagagttcgatagaactctttacttaggaatccctcacttctaaacgaagtgaaagtgggggtagttcaaagatcttgtatttcttttttagtgaatagctttttagtcattttaaaatttctccggttctaaattttctttctataatacaagaaataccctatcgaatagatttttttacggtctatttaatagggtacattttatacagatatttacttttataataagtgtgcaagttttgtaatagtgctctatttattctaattggagtatttaagctagatactcctatatggatatgtaattttacatatccatataaaagacagatatgtattaatcactattaaattatattgatatcatttttaggtgagggattcatttagatataaaggaattaatggatttttatgtttaattatcatagtataattatttcactttatgaaatgaaatttggatttaactttttttaaatataatattatataatttgaatgaaaaaatatctgaaaaatcaaatttaatcaaagcgattttctggtttacttatgaaaaacatagtgtttaaaatgagggggaagtaagctccttatattctatcaaaaataaataaaaaaaagagatgtaattacttttttgaaaaaatctctatcttcaagtatgtgtgaagaaatcctaacgttaggttgtacaacatttacgatcaaaacttgtaaaaaacaatagtgaagaggtgtacggaatgaagaataaaattatgacaggatttttaataacatcaatcgttactggagcgactattcctatcaatactctcgcaacgccaatcgttcaggcagaaacaaaacaagaaaatatagatatttcctcagcattacgaaaaataggtgcacactccaaattaacacaaacctttatcgatggagccttatcaagtccgaatgtacaacttgaagaagttccatctttaaatacaactcaatttctaattaaacaagatatgaaagagtggtcatccgaactttatcctaaattaattctattaaattcaaaaagtaaaggatttgtaactaaatttaatagttattatccaacattaaaaggatttgtagataataaggaagataaagaagggtttacagatagactggaagtccttcaagacatgaccatcacaaaccaagaaagtgtgcaacgtcaaattaatgagttaacagatctaaaactacaggtagataagaagttgaaaaatcttgatactgatgtggcaaaaacacagagtgtccttaattcagagggaacaggaaaaatagataagttaaaaaatgaaatgctagatacaaaaaaatcaattcaaaatgatttacagcaaatagcgttattaccaggagctttaaatgaacaaggactaaaggtattccaagaaatttatagtctatcaaaagatatcattgaaccggctgctcaaacagcagtagtagcgtataacaaaggaaaagaaataaacaatgctattgtagacgcagagaataaagcagagcaagaagcaaaagaaaaaggaaaatcagctatagaaattgaggctgccaaaaaagaagcacgtgaagcgatagagaaaagtaaaaaaggtgaaatcgctgcagctgcagttacaaaaacgaaagagtatgatcttatgaaagtaattgatcctgaaaaaattaaaaaaacatataatacttttgctgaaattaataaactaacagcagagcaacgtgcatatttaaatgatttagagaaacaaaatcagaaattatatgacttaacgactaaattaacagtagcagatttacaaaaatcaatgattcttttcatgcaaaatgatttgcatacatttgctaaccaagtagatggagaaattgagctaatgaaacgttacaaagaggatttggatctaataaataatagtattacaaaattatcgactgaagttgataccaataacacccagtctcaaaaagatacattaagacgattaaaaagtgtaacaactcaactcgaagaacaagtttataaattttaatattaagaaattaggtttaataaaaatattataacgcaactgaaaataaggaggagaatcaaatgatgaaatttccatttaaggttataactttagccactttagcaacggttataactgctacgaatggtagtactattcatgcacttgcacaagaacagacagctcaagaacataaaatagaaaattatgcgttaggacctgaagggttaaagaaagcgttggctgcaactggctctcatattcttgtaatggatttgtacgcaaaaactatgattaagcaaccgaatgtaaatttatccaacattgatttaggttcaggaggaggagaattaatcaaaaatatccacctgaatcaggaactgtcacgaatcaatgcaaattactggttagatacagcgaagccaaacattcaaaaaacagctcgtaatattgtaaattatgatgagcaattccaaaattattacgacacattagtagatactgtaaaaaagaaagataagatgagccttaaagaaggaataggggatttaatcgatacaattcatacaaattcaaatgaagttactgacgtcattaagatgttagaggctttcaaaacaaagttgtatacaaatactgtagattttaaaaataatgttggtggtccagatggacagggaggattgacggctatattagcgggaaaacaagcactagtcccacaacttcaggccgaaattgagaatttacgttctacacagaaatcacattttgataatgtattagcctggtcaattggcggtggactaggagcagctattttagttattggaacgattgcaggagcggtagtaattgttgtgactggtggtacagctacaccagctgttgttggcggtcttacagctctaggagcagctggtatcggtttaggaacagcagctggtgtcgaggcatctaatcatatgaattcttataatgaaatttcgaataaaatcggagaattaagtatgaaagctgatctggctaatcaagcggttatttcacttactaatacgaaagacactctaacatatttgtatcagacagtggatcaagcagtgatgaatcgttctttatcatacgtcatttctagctttctaatataacccttaatagaacgttgaatattacgtctatcaaataactttttaaaagctttattaaatctatcaatctcacttttcaccatatcagctttaatatttggagtcgtcaacgttaaaaaaagaaactctttcttttcctcaatcttaattgcttccatcatcgttgcgattttcaccgcgtccttccctgctttcctccaagcacaaatcggacaaaatcgatttttacaatcattcccctttactcgtttcttcttctttttatcctttgtagccaaaaattcattaaagatactgcacgatttaaacaattctttcccgctctcactcattttcttctttataaattcgtaaatcttgatattctgtttctttttaggttgtaatttaccagtgatttcatcttgatttttctttgccatatttgatatattagtcctatctgaaaaacatcagaatttctaatttctgaatttcatattcgatataaaaaagggtgtacgaatcctttttttggacttgctcctctcgtggtatttatgatttttaattcgacactaaaaatgataaatctatccgcctgaaaaagcaagtctttttttttacaaacccttgatacataagggctaaaagaatacataggcatcaatttcgttgccgaaatagttacctatgtattaaagaaagaaaaaactcgatttttcgaacacgaaaaatcataaaaaaatgcccctaaatccactccgtggacaggggcattttttttcgttcaaaaccattttttttaacggataaaacatctgagaaacatactcatcttaagcaagttataaaaaacaaattccgctaacgctataaatctaaaaaacaaaaaactcaaacagaaccacactatctctccaatccctggtcccgatttttctgttggctacttcgcacttgttttaatctcttttgttgttcttcatgctcttgtttatgattcaaaaacttttgagcgcctctcacttcatcatcactagtaaaatatcgttttaaaaatttgcaattcatcctgtccaatatactccccttaacgtaaccaatcaccccagccaattcaggaagcttttctttatacaactctttcactcgttccaacgttttcttaaagaaatcattctcttccttcaatcctcgattctctcttttcaattctgttatttgcccctctaaaatacatttctctctatacagcccatctttttcacgtgtaattacacctgattcgtttttaaggcgtctaacatcttctctaagggcttccgacgacctagctaatacttttatactttcgaagtcttccgaggtaatctcgaccgttttagagcgtataaacccacctttttctttaactgggatctcatccacactttttgcttgatctaaagacatttttaaatcatgaagacgactatctattcccttcttttcttgctctagttcttctatttcttgttgtaaagtcaccgctttaaaccgctgcgtcgataaatgttttctatcactagaaacaccacgctctatatcaaatcccttttctttcacatgttcatagattttatcttgtaaatcatgaaactctgatttgtttttaaaaaatgaatacgctgatagtttttgtttttcattaactggaaccatacccacatgcatatgaggtgttttttcatcaacatgtacggaagcatacacaaagttctcttctccatatctccccttcaaaaaacgaagagactcttcaaagaatcgtctctgttccacttgagataaagaattcatataatccggactagccgaaatcatgaacgaacaacaaacaacagcgtctttccgaattgcacgattagatacaacaccattatcaattcgattttgaattaatttcttataatccactttttctttgtcatgaatcagatcataattctgttccgttcgtgcttgaataatatctgaattggaatgactttctttttcacgttgattatgtatttgtaatcctttcacatctctcatcttaaatttttgcatatggcaaatcacgaacttcgacatgggcctcgctcctttttttcgggggtagttccatgtaaacagtagcacactacagtttactgcgtaaacacgtgtgcccttcgggacatttcggctaccgccgagccataacaagcatggcaaaaaaaatcatgggctttgcccaaacccacaagggaaactcttccccttgacccctttcaatcgaactccccaacccctcaatccttgagggactccctcgccggttggcatccccaaaacggctaacgttttggagttccaagagggttctgggcacagtgggttcgtccactccttaatgctcacttcgttccgcttaccgttggacaaacatcatacaactacctctaactttttacagttgacatccatgtattaaaaagtctctttttatattcaccacgactacataacatgtcccgctgccatgcaatacatcctcgccaatcttccctatttttttcagctactaaccaacttttcttaaaaactattaaccccaacaatgacaaagccattcccgcgtcctcgtaaaatgtcctcgccaaccttcaacatttttcaactcgccaccgatctatgggaattttcttgtagtgaaatgactacttcctctacaaacataattttttttgttttacaggaagagcttcaactattctctatttttcaaacatcatcaaatctattgatacaatcatattctttatgagaaccactgtcggaacagccacagaataaaacgacaactattcctagagcaattccaatatcgaatccatagaaaaatacacctcagaacgctcagaatccattctaggaacttctagttcccttaagaaacccaacatcctaaaatacttaaaaacgattataagacccttaaaaagcaaaaataaaaaaagagcataaggaaaccgaatcccactttgcaaaaaaagtggtgaaataggctgtgcctattgggtttctatcactctatttttagggatgtatttctaccgtttgtatgcgacctatatgcgtttttcggcactttgtatgtgtcccgtatgcgcctatatgcgcttggtatgcgcttaaaattaaacctaaaaaaactgggatgcgttttttcgggttgtagttcgttttgagaccgtttaaagatggtttgtgggtcgtcttgaggcttttgtagatcgttttgatgcccttttaatagttacagcaaatataacaagaaaaaagtccattcttttgaaaagaatggactttttttgaaacgaggaaaaattaacttgtaaaccattttacctgtacataaccagtataatacaaaataagaataagggttagaattttctgttatttagactaacattatgtgttaaatattttttttagtaattaaataagctatgatagctgctactaacgctaatgctacaataattaaattttggattatatatcctgtaaatgagtaatcacttttaacaatccattgataaatatttagagatagaaaaagtgttaccggaaataaaataaaatacatttgttttaaaattgaacttttatccataaattgcacacttacctccataataagctaaagtagccgctaaacctgctacgctacttcctataaagaatttaacgcctattttagccgcttctttccataattttttctcaagataatatgccaatccaccattaaatgcggcttgtacagcatttactccaaaaaagtcatataaagcatctttcatgcaacttgtaaaagataaaccagcaatatcacttttatcttttttaatttgttgtttaagtgcatctaaaccaacatcattcccatatttcgcttctattttattaaaatcaaaatcaacaatttcaccttgattattatatatagcggcttcttcatgcataaattgaaacgcttctgctaattcattaatgctcttttcatcttgaccagaaacgagagactgtttcgtttgtattatattgttgttatttgtagttgccgcaaaaacattatttgtcacaaatgctacatttcctgccaatattcctccgactaacaatactggaatcatttttttatatgtttttctccaattacttctctcaatactaatttttttcataaatttcatccccttaagtttattattcaaaatagataataaacttaatttacatataattcaatattttgttaataatcctaatatttaggtcgattgctaattgttggaatttgcttttaaatatcttttccatgtgcatattgttgaataatatcatttttttctttagcatcatgtgtttgaatggaattattgaattgggaaaagaaaatacctgttgtacatgctacccctattagtatcagactaaattttttcatcatttcaatgactccctttctaataagtttcttttagctttgtaacttttataaaaatattcattagatttatccttattcttttcttcataaaatcttatagccaattcttcagtataatcttgtatgtatttccatagattttgtttttcaaaatatggaatcgcgtctaacatgactttttctaattgttcagtagataatttattgtttaatgcttgtaaaaataagaaatgaattttatattcttggttacaaacatttagccctttttcaatatatgtgtttactgtatttgtttgttttaacttgtaatattcttgtgctaataaaaacattgttttgtaatcgtcttcttgattttcaaaggattcaagaagataacggattgcaagttcagaaagattttgatctgcatataaaagacctaagttataacgtacgattaaagctaatttgttttcactgtgtttttcaaatttattaattgcggaaagcaagtattcttctgcaacagaaaattcccttaatgtaatacaagccataccaagtgtgttttcacatgctccggttttaatctcgtatcctagtttcccactaaaaaaacttttggctttgttagcatattgagttgctaataaggcttgatgagtatgataatagaaagttgcaacagcataattaaattcagctttttctacttcatcaggaatttcttctagtaatttttctgctatatcataatatttttgagtttcactataatttcctgttttcattgcatgcatgcctttaaagaaatgataatagtaatctaaaaaattatttgtgtgttcttttaattgttcgattttttctaaagattgttctctatctgcatagtcgtttgtaagaatcttgtatctcaaatcaataagtgaataatataaaagtaaattttggtcttcttctatgttgttaatttctttttcaatcttttgttttaattgttttgctttaataatgtgttgcgctcgaatttcttgataccaatcatttaataattttgtaatttgttcgtttcctagttgaacattcatagaatcttctccttttccaaaattatctatattttattttctatcatgttatcatgctattgtataagactaacttttcaacagttgatatataaagtttttaatattctgtatttttaaatagtgtagcaccttcactatttaaaaatacttagtaacaaataaaaaaagagcccccaaacaggaactctttttcaatactcatcaattccatcactttactgcactactatcaatgaaatcacgaagtatgccagtaccgctcatcttccaaggtgttgacgcacctagcaagactataatttcatttaccacattcaaaccatattcatacaataacaaatagaaatcaaaactttaaatacacatatagccctacaaaaaaaacatatgtgaatataactcattgtcgattagcaaaaatatgctttcatcatacacaagctatctaaagctaaaatagcccctaaattattttgtctcactatcatctcgaatatattcaattaaatccaataactcaacatccaacttctcacagatcgttatcaatgtatctaattttaaagaagacacattctcattgtgccacaacttattaatagaattacgacttactcccgttattctcaccaaatccgaaatattatctatattctttttcgccataatcatacgaatattacttactaccttcatttttcatactccttttcattcaatgtacataccattttacttacaaggatacttttatacaaataaaacataaattaaataatattaaggttattttttatatattcacatttaatattaaccttaaaaataaaatatattgttttattatttaattttatttgttttaattgaaattttaaccccttagagttaaaattaaatatataacttaaaatttaatcttttaaaatgtatttttaactctaaaaaaactaagaggagattatcattttggcattcctaacaaattacaaagcaaacggaaaaagatacttttatgtagaaaaatatgttggtaaaaaaccatatacttgcaaacaaagtgaacgtatttattcaattggaaacgaaagaatcacattagaaaggctcactttatggattttagataacagtttcattccaaacgaattaataaagatcggaatatcaattaacgatatagagaactggagagaaaaagtagaaaacaccataaagagatactctttataaataaaactaaagaaaaaagactgatattttttatcagtcttttttctttaactatttatattttttcatcataaaagggttaggtattttaataatatatttatatatttaataaaagttacgcgtgactttttgattttttcatttgcgcacaaaagcaaaaagattttaagagtaaaaaggattaaaaatatacagaaatcgcgaaataaaaaattcacagaaacaacaatttcaaacataatctaaacatctttttatcacacaactcgtttgaaacggtgcaactttttaacgatatgaaatatctatgaattaaatatgcgagcaaagttttttcgttttcagttcgtcatgaaggtattatataaactccttaatttcgaaatacagaataacaaagaaaagagaaaacaaaaattccgaaaatcgaaaaatcgagatttccaatttaacaaattccaaaatcaaatcccacataaaaaatccaaaatcagccccgaaaatttagaatttctcaaaactatattttcaaaaaaatcatcaaaaaacgtgcggtattttatcgtaatatatattactaaaaaaattcatgcgcacactttaagttttcacctcgtacgttagtaaaacaaaattagtagaacaaaatatatctcgaaataaactttaaaaataaatttacaaattcacgaaatttaaatttaagaaaaactcctttttgttaaatcataaaaaaacttttgaatgctacttgctgcactcaaaaatagactcaataaaataagggaactgacttgatataacagtcagttcccttattaaaaatttctaacatttgactttgcttttttcacaaatcaaccaactaaaacaattctttatgacaagtctcacaaatttgcattctaccttcagcatcaccaataattttcgtttttttagattgaatcttgaaacaataaaaacataattttctatttacacctttatgatcaattttttcatattcatgaaactttttacaaccaagacaataataatataaatctcccgctactttcatacactacgcctccacatctacttcattaattaaatgaccgttatactcttgcttctcactctcagataactcttgatactcttgttcaaatttcattaaatccttattccacattgcgattaatctataataatattcattcttgtctgtactcttatacttgtccaattcgccatcttcatattttttcgcataatcttttaataatccaccgtaaacaattaattgacgaccttttaatgctaaatagaacacgtcaaacacttcttgactaaccgacatttcatagtctttcgctgaatacttcgcaacctccgcaactgcatttccttctcgtattaactctactttttgaatatgtacttgcgtaatctctggcatatctgttacttctcgccacatttctaaccattcttcttgcttaatataaagctctttacgtttaaaataatttttatcaacacaaagcaatacatgaaaatgaggattatatgtatcataattcgggttatgatcgtctactttcaatccacgagaatcataatatgcttttctatcaaacaacaaaacaagcagcacaaacattaaatattaatcatacaacttttaaaaaatattatggcatgtttgagagatataccggatataacttcttaagagattcaaaaggacaggtaatgtttagtgaatatgatttagaagtatttaagaggttattattagttaaggcggaaccaggaaggactatagaagaatcgtgtagacttgttggtgaagagtttggtatttcggataagaatcgagttataaccgatatatctcctgaaaacggaggggataataaggcgattgaagagttaaaggaattgattttaatgcagaataataaaattgatgaattaactattaaattaaatgaacagtcaaatcaaactaagatgattgaaacaagcgttggagatagagatcagcaattggttagattaatgaaagaaatgctagaagtgaaaagaatggtggcggcaagtaataaaaaaagatggtggcattttttcagaaaataaatttagccgaaaaggctttttttattgttttatagactctattgatgtaaaattggtgttaataaaacatcaaggaggatcaagatggaagaattaaataaaaaaccacaagctgaaatggttcgtgttaatactcgtatttctaaagaagttaatggttggttagatgaaaaaagcgctagaactggtgtacctaaatctactttaatttatttggctttggaacaatatatacaacaacaaacaatgtttgaggagttacctaaacttcaacaaatgtatacgcaaatacaacaacaacaaatggttcaaggagatttgttaagtgtggttaataaggataacaatttagctaagtttagtttgtaatttaattttaggaggagaattaaatatggatgatgcattaacaaaaattttagagaaattggatcaacttgataagaaagtagatacgattggtagtgaggtaaaagaaattagaaaagaaatgcaagcacatcgaatggaaatagatgataattttacgaagttatataagctagttgaggataaagatgttgagattgatgttctgaataaacgtgtatttaaaaatgaaacaacagttgaaaaattaaagagacaaaaacattaggattcatatgtgaattaaaattatatgtgtttatttttaaagaaagaagatatttaaggggaatgatatcttgcaaaatattaaagagataaagaaattaattaggaagaatcctggtaaatatgcgagcatttctacaactgaagatggtgattttgaaggggttttattgagtggattttttgcaaagcaagttatgaaattggcttctcaatccaatcatatttctcatgattttaattcaaatgatcttagatcttctgatctaactttaaaaggagtttttctttttaatggtactggagttcattttgttttttatgagggtcttgagtctataaggatttatgattcgccaatgtttgaagaggattctaaagagatgtttgagtattttaaggagtggttacatgcacattcttgatatttactttagtaaacgttgtgagaatgtaataaaacatatttaacagtttactgtgtaaatgggcactttgtggaattgtttatagagaggtgttgttatggacactttgtggaattgtttatagagaggtgttgttatggatttaaaaacgtattatgcgaatgttattaatgaactagaaagtattttattgtcttcagaaaaggtttgtgaagacaattttttaaagattgaacaatatttaagtaataaatcttttattgaaaatgatattgactatattttttatcatttagataatcttgagtgtttagtaaaagatcgtgtttttcttgaagatgctttaaaaagatatagagaaaagttagataaagtaaagaagtaaattcatagtttaatgtagtttctacttaactagttaataataatagggatagagtcgcactttttattcgttttcttagaaaggttgttttttatggctttagatattgctaaatgcggtcggcggaccatcgttttacgcgaaaaagctactggtgatgttatgatccgaagaatgtcctgtaaccagctttcttgccctgtatgtggtccggtcattgcagcacgtttacaacttcgaattaaatatttttctcagcatgaacgtctattcttttttaatactattacttctaaggatggtattgatgatctggagaagacttttaaaaagattcgtaaagaattgtctagtgattttacgattgaaggatatatgagacgtaaaaaagttagttacgagaaagctttaaaatggtatgaaaagaaaaagaaaaaaatgatagattttgatattgatgttgaacttggaatttattcaagaaaaaatgcaatcattgaagttgcaaatttaaaaaaggtttattatttgggtttaaatgttaaacaaaaaattgaatttcataagaaatataatcatttagtagacgagctatttccggctattcatgaagttaataagcgagatgaaatattacataaacagttgtacgaacgaattttaagacgttttgaagagaatgaatttgaagattttaagtttattagggtagttgagttgcatgaaagtggacaacctcattatcattttttatgtaatcgttatgtttctcattatttaatgaagaagataacagttgaaggtgtgagtgaggtttatgataatgcgtatattgtggatcatgctatggagagaaataaaactcttacatatgacactgtagatactgatattgtttctttttatgtatcgaaagttactagatatgttactaaggagactatagaaaccttttctgaattggaaaaggaaggtgatatagctaagaaattaattagttcaagtaattgtatcaagttgtttgatgaaaaagatgaagaagaatctaagtataagaaattaggggtatatgattatcaaattaatgcaacaagttatgaggttccaaaagtattagaaaatagtgtagaagattttattaagtttcattctgtaatgcttagggatcagtatgcaattgatttattgaaattttcaaagtcattggatttagatgattttataaattgtaactatgtaattcatgagcgtttaattcaagtttcagttgctgaatataaaaataagttatcgactgtttttgatgagactgatttaactaaagaacaattagagttattaaaatcttttgtagaaaataaaattacattattgttaggacgagctggtacaggtaaaacttatactttagttaatttgttgaaaaaattaaagcctaatccacgtacaacttttattttaacgtatacaggtaaagcgtctgtacgaattaaagaattgttgagtcaacatgaattaaccgaatacaagcctatgacagttcataaagcatgttcatctaattggaattcgaattttttaaagaatgagtataataacttagaatgtgagtatttgattattgatgaagtaggtatgataccaagagatattttgatgaaagtattattagctgttcctagttatacaaagattatttttgctggtgatgatgctcaacttccacctgttaatgattcttctgtaattcctgaattagaaggtttagattttataaatactataagacttacaaaagtttttagaagtggagatactgtgttagagcttgcatataaagttttaaatcgtgaattaattgattttagattatatgatgaaaaacaattagaaaaactagttttaccacttgtggaacaggggtatcaaattttaacaaatacaaaaaaaatgactaagaaaattaatttaatagttcaagctaataaggataaaattacgaagtgttttaatgattattgttatgaaatcggtgatagagtcatgatcattgctaatgattcatctagaagggtttataatggtgatactggtaaaattgttgattatgatgataaaggtattttaattcaattggattttgaagataggcaagtgttttatagatatttagatacagttaatattgtaccagcttatgcatttacagttcataaatctcaaggtagtgaatatgagaatgtggcggtatttttagaaagtcagccgaaattaaatactaataatttattatatacaggaattacaagagcgaagaaaaatataaaagtttatgtgccggatgaaaaggttttatcgactatgataaattgtgttccagaaccggtttcgaatataacattaaataatgtttttgatttagtaaatgggattttagatataaaaaaaacatcttcaatgggctgaagatgtacaaaaatgtagattcttcaatgggttgaagaatcataagactgaaatgattgttaaagaatctaattgtattatatatgtaatttgtagcatggtctatttaatttaatttttcggaaggatttgttgtttatgtatggtgcttatttagatccagaagatagggatagaataatgggtagtttgtctgatgaacaacaagagtatttacgtatttttttgaagagaggtaatcagacagcattctctagtgtgttagctagattaaaaggtggcgaatctgaagaggatgctgaacatatatctactcaatggatgtttattgagtagattgatgcaggaaaagtttcgaaagatcatccgtgtgagtgtggtcgtcctttacgttatcaatatattgttaagaatttagtgactaataaaattttaaagtttagtaaggatcactttaaaaaacatacaggtttaccttctagtattgttaaggcagttttgaagggaatgtataagattgattgtgagttagatgaaattttgattaaaatttcatctggttggtctttatttgagaacttaggtatggattctattcctaatgatttgattatgcctatagatattagagagcatttagaattagatttacctttattagaacgtcaggttatgagattaaaaggtgatttgagaagttataattcattaaagaagaatattgttgagaaaaatgattctgtagattttgaaataaacgaggaaagagaagaaggacaagcttctttgtttgatgaagacattgtttttggatttaatttagatgatgataatgttcaaactatacgaagtcagcctgtgaaagtgaaacctgtttctattgagaagaacatttcgtatcaatttttaagttttgttgaacaagaatttattttgcagtttatacaaaatgttaattctgtaagtgtgagacaactatgtgaatttatgattaaagaggttggctctttagataaacgttatcttactggaaagcctcatatctacgttcatgtttgtagttatttagattttttagtcactcaaggcaagttgagctatattgagaatttagattatattgatcgtatttattatatagaatcagatattagttagaagggatatgtatattatcccttctatttttttatttatttaatccttttcttataagttctagaattgttgctgttctagtagaaattccgttttcttctttgtattcgtcaactttttttaatattgattgtgggattctcatttctactctttcttttttatctgtcattattatcacctcttcttgtattgtacggaaaaatatcgtataatacaaattgtacggaaaaaagacgtatttttcacgtacaaaaaatgaaaatcaaaggggattttattatgttagaagacaaatttttagaatctaagattaaaaaattaactaatcaaaatgtagtggtttttactgatgatgagattattgaaggagtccttttggataaggatactggagaagaacgtttgtttgaagtttttcgtaagatttggggtaagaatttcgcttggtttggagaaggaatttatattcaatgtgaagatacagtgacgtttcgtgattatgatgaggtagataatatatttaagaaatagttttatataaatttatattaaatgcagattatttatagaagagcataaggtttttttgctatcactaaaggtgacaggttagacaaagcctaacaaaaacgtgatatcataaatatgagaaaatcaatggagtttcaatgtgtttccaatgggttttcactgtatataatatgttattagaaattggtttttttgcttttagattgataattcttgtgaaagataaaatgaaattccatttataaatgttgtatattttaatagttttataggagtttttaagaagaggttgatgaggatcaatgcatagcagccatgtgcattattgtattagcgaataaaaaaaacgatatgttaacgttacccaaaaggatagctttaacatatcgttttttttatttttatgcctactacggtaaggctacaccaattttttagttccaactaaggtatggatactccaaaattaatcatcattcttttgttttatgttgttgcgaaggtgaacagaaaaaaacttcgctgaatttcgtttttattttaccacaaatttaattttttggtgcatttttagtgaccactgagtgaccactaagtgccaacaaatgaccatcagaatgaaaaaatgaccacccagtgaccaccaattaataaataggcgtcccagttttcgtggtcgtttagtggtcatttttggcgcgtacaaaacgcatacttttaatttttttcacatacaaaacgcatataaaatgaccaaaaatgcatacagaacgcatatgagtaaaaaaagacgtcccactttttcgggttaaaaaaacgttgatttaaaggggcgtaaagcgtgctacaagggacacaaaacgtgccacaaaagtgctttaaacgtacacaaaacgggctacaaagcccaaaaaggcatcccgtaattcacaaaatagaaacccaataggctcagcctatttcatcactttttttataaaatgggattcggtttccttatgctcttctttaaaaaaaggtttatatggctttttaagctggtaaatattttgtattaaaaaaagaaaatgcaggataaggagagggacacagttgtgtctacgtgtatcagtcaaagcctgatagaataatttttcattgtgtacagagttgtgaccacgattgaaaaagggaatgcgttttgtggtcacaaaacatttataaggtctattttactaatgttttgatgtagccttactaatagatccgacagattaaataattaatgtttgtggcaattagcgaggaatggcgaagattagggaagacattttttgaagtatattggggcgaagtattaagatttttatccaagtaatcgttataaaaaaatcaaaatgaaatggcagcaggactaaattcaggatcgttggaggtttaaatacgaatatagtgttggggtctcaagaagagataagtatatatttagagattctatagaaaaaatatttttaatatttgtcgcagaattagtgcttacgccctaaagattatgttaggtatggcgcgcattcggccttaggcggatgcgcgccagggatagttaagcgttaagaggatgaaaaatattaacaaggtagttatctatagagttatttaatatatagttggatctaattgtgagttatagaagatatagccgatataacttcagctataaaggtagaatgattaaaagaaggaacgatgtatatattcatcagaatacgcaaaatcacttctggaaggtttgaaatgtgaatcggtagatggaaatggaaagcctgtaagaagccgtagcaaggcgaaggagttttatttagaaaagttttttgatttgtaaaaagttttttaaataaaacttgatgtcccgtagggttgcctaaaggaatagtaaatcaagctattgcgtactcccaaacattgtttgggggacactcgctgtgagcgtaaagggtgtgggaatatcccacgaataaaaaatttttgtgtccctttttttaaaaaggacggtttgattttgtggaataatacgggacgtgaaattttattatgatttataaagtttatataaattataaaacaaggagttatatcggttatatcgaatgtaaatttgtgaggtgattgcaatggttattatatatcaaacaacaaaacaagcagcacaaacattaaatattaatcatacaacttttaaaaaatattatggcatgtttgagaagaaatatatgacgtattataatcattatagatatcaatggaatttaaaaaagatgactcctgttggatacagaaaccatcttcttgatgttgcctaacttttttcaaaatgtcctttacaaagggtacagattatattaagaggactttttttctatttcccttatttttttccgcaactgtttgccaagtgaacatgctcattaaaaatgttgttgttaatttgtttttcatatttctttaattcttcattgattttactgccagttttactttcaaaacttttctctaatttagctgctatatctcttagacttgtttgtaattcatgaaatgcccctatgtttttttgaagagcatatgtatcttcttttataatatctattgatttaaaccctacttctgtttttaacatcatacgctgcatttctctttcaatctgttttttagcagcttgtaactcctcaacaacctgactcgctaaatctcctgtcacattttcgatttgcttttctatctttttaatttcccccataaaatccatcatataattatctccttatctaaactgaaaattccccgctaaatgattatctttatccctaagtgaatttgctgcatcactaatttcatccccaaatctacttaaacttttttgttcttttcttaaaagatgaattaattcttctgctatgtgtacatcgtgaaaatagtcatttccaccttctttcgttttggcaattcgtgagatggcttcatctatttcgtatgcttctaatagatgatatttcccacctggtcctgtttcatattttaattgacttttcaacttttgaaccgcttcagcttctcttctttgaaactcttctatattttttgctatatctaataatcgattactgagcatttgaattttttgtgcttgtcttataatatcctcaggttctaattttaatagggggcttccatttgaatgaaatgctcctctaaatgtatctctgccgtgtccgtccatagttaaacgtgtaaaaaaatcttcttttgtatcattctgtctcactgtaaattgcttaccaattagaggtgcaccgaattgagtatggttaccaattgggtcattctcatgtgtataatccgtagctttgttttccatttcccctctatctactcgttttttcgcttcaggacttagcaaacgataaggatttggtgcagcccatgtagttgcataacaatctaattctgcagcgataaggtccgcttctgcaccacctttactatgtccagtagtatgaagagaagaagggttatattttgctacgatgtcattttttgcccattttaatccagtatcaaatgatgtttcagaattaggttttatagtttgactattacttggagtaattactttagaatgtgttttaattccaaacgaaatctgatcgatatctgtttcgaaatctgctaattgcgtaggctctgtaccgcgaaatgctaggattatctcatcataatgtgttgcattttctttgtaatcttttttcggtactactgcaatagcttctaatccattttttactttttgacaatctgcatcaattgattctataactacccatatcttaccatctaccccttttatttctttacctttttttaaaacttcgtcatcataaacatgatctgctaatttgaaataatcttcatccgttgcaataggattctttttaaattcactcatatctttcaactcatttcatggtatattttaactatattcaaatacaaggggattttttatgaagaaaaaattagtaattattttatccattatttgtattatagcaggaggatattttactatggaatacttaaaacaaaaagaaaaagaagaaaagttttggaaggcacaagaggcacgagtagaaaagtatattcattacaatattcaagatgtaaaatcgattacatttaaagaacacagtgtaagtccaatgggtgttcccagattaaaaggttatataaataataatgaagaattggattttatagcttatattagtactacagaaaatttcgaagatgattttacacgttctggagaacttggaaaacttataaaagaccctgaaaagtcggtatctgaaattgaaaaagaagagaaggaaaagaaacaagagtagtctttgtgattactcttgttttttattatagaaaaataaaatatttgaaagtttttaacaatgcattataatatatttagtaaaattaaccaatttatattttgctcattatgtattaaaggggaaatgaaaatggctggacaaattcgtatgtcaccagaggagcttaaatcgaaagcgactcgatatggacaaagtgcaaatcaaattgaggacattttacgtcaactacaaaacttacaaaatgaattaagaggagaatgggaaggccgtgcatttgaaggttttgaccaacagttcaatgaattaaagccaaaagtacaaaactttgcacagctattacaagaaattaatatgcagcttaataaaactgcagaggctgttgcttctcatgatgaagaattatcacgtaatttcggtttgaaataagaaatgttgtaatttctacatgaaattcttggaaaatgatagaaagtagactagtattcataagtttacattcgaagatacataataaaaaacagtagtgattttatacactactgtttttttattgtttcttgcaagtgaattatttatattcctgtctatataatttaaacgaataaatagctccaataaaaaatacaaaagcttcaaataatataaagatttgacggaaattctcaatatctttaccaactaaagaaataaatatagcattcattagaatttgagtagtaaacatacgagaagtaatttttaaataaatagcatttgttctttcatctggtttaccaatttttttgtaaataataataagtgcaattactgaacccaaaaatagaagtgctgtaagtcctacaacgatattaaaattagctgtactttctaacatccatttatttaatagatcaatcattattatcttcctttcctacataagagaatatttcgttcttctttttcactataataaaaaaagaaaaaggaaaacatcgaactttcttacaaacattcgtgtattcttacagttttgtcattttgtaaatgtattcatcgccttgcctttcactattttctttggaaaacatagtgaattacgagaaagagcgctacaagatcaacttccaagaagtagtgcactaaaactcttaattaatgcaattagtttgttttaaagtagtaagtggacaatacttcttagttgtagaaagtatcgagatccctgtgccaattccagcgtttgctgcagctctattaattggtttaggaataatcccgctttgttcttaatttaaggaattacaaacagttctacctttcaattgataagccctcaagtgtatgaatgcttggaggttgcttataaaaaaaaagacgccataaggcgcccccacaattgggtagataagactttagttttccaatctaaagaagttttgtatcagctctttgagagtatatcataatattcggttcatttattatgcatttttacatacctattaaaatacctctattttccatttgataaagtatattaccaaaattcaaataaatatttctgaaaattcaaaatatttacaaaaatcacaaaagtgatacatttaaggtgcaagttataaaaaactattaaagggggatttattatgttcaagaaattagtagttggagcattagcagctggtatcgcattaacaggggggatcggggctgcgtcggcaagtacagaagatacaacaaattcaaaaagcctaacgatggcgtattcctgtcctgattatattggtaatggtaaatatgcacaaactatttataacccaggtggaacaaatgctgtttatgcaaacacatatactgaaatgacttgtcacggaaaaataaagtggtattttaaatggaaaaaagcagacggtggcggttactacgaaggagaggtaataaaataagtttttatgaaaagcctcaatatctgaggcttttttctttgtataggattatccctcataaaaaaagacacccaaaggtgccttccgacttgaaccgctttaattttaataatatgtattggactctcatccaaatattattttactatgttaagtattattggtcattgagaaaaaataaaattactcataagagtgcttattcttcaatctaatgttttttactagattttttatgtcctttatttcgttcacaagccacgccatctccatcacgatctaaatgcgaagcataagctgggctatctggagttatatcatagtaaccggcattatttgcatctgtacagtttgcaaagtgtactttctcttgctgaggtgctgtattagctgcagctttttgttgctcctgttcttttgcttcacctgcttcttgttgtttcttttgttcttcctgttgtctttgagcctcttcttgtttgcgttgttcatctaatcgcttttgctcttcagcctgtttttgttcctcagcttgcttttgttcttctaacttcttttgttcctcagcttgcttttgttcttctaacttcttttgttcctcagcttgtttttgttcttcggcttttttctgttcttctattttcttttgttcctcttcctgtttttgctcatctatcttcttttgtttatcttcttttttagtttcttgttttggttcttctgatgtatttgctttatcatttgaaccacaagcagccaatcccataagtaacacgctgcatgctaaagccattaataattttttgcgcataatttaattcctccaagatatatataatgtaatatttctggacaatcttatcaaaataaacatctgtatattgtcatatcgtgtcgaatgagaataaaaaagatagccataactctcaatggaaaaatgataagaatttaccgatggatattagagcaatatcctctattttttactaatattaaataatagtttttatcaaatctatcgggagatgtggttttaatgtggggtaggggtgtgtatcaaaaggtgtaccttttgggaatgttaaattttatatttttataaacttaataccatattaaggtgatagtagattgtaagagtgataataggtgtagatttaaaataaaattcgattatttataataaagatagataatttgtaataaagattgataaaagaacctgtgttgatatgatcttagggtcatccaaattacgtgacctcattgataaaaataaataggttaatcattcgacacttttattgaaaggagagagaattatgttttttatagcatatttgcctatttttttgtacttattattagaattttatagaagttcacctgttaaagaagaaaaacaaaatagtggttctagtttttttatcggagcagttttagccttgatgataaccattccagagattatgtatttctttacaataaataaggttaattcatttctgttttttggtgttattgttgggctaattggtgtatggattagattttcttcaatgaatacattagggcgattttacagtaggaacgtcggaatgcagggagaacataagttaattcaaagcggtctgtataaatatattcgccatcctggttatttaggttcttttctgacctttttagggtttgctatatcttcatcttcgttcattgccattatcataaatatctttttattttttcttgcgtattcgtatcgtataaaagttgaagagagaacccttgttacactatttggtgaacaatataaacaatatcagtccaagacttggcgaattattccgtttctatactagaaattataggagaaagttcaaaataagttactaaagtcatttttccttattcagctaacgggtgcgttagttccaaaaaataagatgattcccttgtatttttacactcctttaaataatctaaacctatgttatttaacatctattatattagaaaattgcagttttatcttgttataaaaagcatcggtacataaaacagcgctatttggtggatcaatattaacaacagtcatatagctagagagtaaatagccatcttcataatatgtaattagtatttcttcttcagataataaggaacataacaacatgttctcaatcagttctttttcttcagcggttgagattggacggggtaccctatacgtttcttaattattttaattgtactagaaattgtgaataaaaaaagagagccgaagccctctataataactactaataaccatggtcactactctcatggtaatatgaatttgattcaccacaacaaatacatgttgtttgttggataaataatggactaagttcagcgttagctgtagtggcatttgagaaagtaatactttgaacatcctcaaataagaaagtttttctatctcctggtgttaatgtaattgtttgtggggttgtggaattaaatgttctaatagtcaatgtaacaaacgaagcaaatacagggctaaaactaaaacgaattagagttttattgtgattagttgtaaaattttcaaatagggtaattgtagaaccgggtgggatttcaagacttgtgggggtagtttcagatccaaaaattgtaaatgtctctatgaaacagttactggagtttgaagagttacatgatttatcttttttcttgtaatatttctttccatctttacagaaataatctgccatatctaatcattcctctcaaaaaagagtttaaggttgtcccatattatattatgaaggttgtataaaaaggttctagtttaaaaagagtaaaaaaaaagagagccgaagccctcattggataaattggtaatttttttgaaaaacggccttgctgccgtccgtctagcccctcataagctcgttggatgtcgttgcaaaatttgaaacttattgctaatcataaaaaagacacccaaaggtgccttcctccgacttgaaccgctttaattttaataatatgtattggaatctcatcaaaatagtattttactacgttaattaatattgatcattgagaaaaaataaaagcactctttcgagtgcctattttatttagatacagtagctttatctttacggaagatacccattaatcttccgatatcagtaacagtcattattaatgaagttttattaatgaatttaaccagcatttttatgtgaatcagcacatgtgagtggatttgattttggaaagaagaaagggacactctatattcagttagctatggaagaactcatgaatcaattgtcccctgttcaaacaatggagatttcagaggcacacattggacagtatcaaaaattaccagctcgtgttattattcatcgattaacaaaagaacaaacagagaaaaggttgaaggaacaagcaaaaaaagaaaagaagaaaggtattgcctacaaagaacgaagtaaacggttgagtgggatcaacgtgtatattacgagtctttctacagaaaatgttccaacggaacatatccatgacttgtattcattacgctggcaaattggcgtgtccagataaggacacattatctagttggtgaaagtccaatcgggagaatagactccactcccgtagcctgacccgccataccacagatgttccagataaatattggaagctatatacgtactttgtttcaaaatgggtcaatcgagaatatcgtcaactgtttactaaaaatcagtttcatcaagcaatgaaacacgccaaagtaaacaatttaagtaccattacttatgagcaagtattgtctatttttaatagttatctattatttaacgggaggaaataattctatgagtcgcttttttaaatttggaaagttacacgttactaaagggaatggagataaattattagatatactactgacagcttccaagaagctaaagaggtccctagcgcctacggggaatttggggtacattgaaaaaggaagagtatgagtattcaacatttccgtgtcgcccttattcccttttttgcggcattttgccttcctgtttttgctcacccagaaacgctggtgaaagtaaaagatgctgaagatcagttgggtgcacgagtgggttacatcgaactggatctcaacagcggtaagatccttgagagttttcgccccgaagaacgttttccaatgatgagcacttttaaagttctgctatgtggcgcggtattatcccgtattgacgccgggcaagagcaactcggtcgccgcatacactattctcagaatgacttggttgagtactcaccagtcacagaaaagcatcttacggatggcatgacagtaagagaattatgcagtgctgccataaccatgagtgataacactgcggccaacttacttctgacaacgatcggaggaccgaaggagctaaccgcttttttgcacaacatgggggatcatgtaactcgccttgatcgttgggaaccggagctgaatgaagccataccaaacgacgagcgtgacaccacgatgcctgtagcaatggcaacaacgttgcgcaaactattaactggcgaactacttactctagcttcccggcaacaattaatagactggatggaggcggataaagttgcaggaccacttctgcgctcggcccttccggctggctggtttattgctgataaatctggagccggtgagcgtgggtctcgcggtatcattgcagcactggggccagatggtaagccctcccgtatcgtagttatctacacgacggggagtcaggcaactatggatgaacgaaatagacagatcgctgagataggtgcctcactgattaagcattggtaactgtcagaccaagtttactcatatatactttagattgatttaaaacttcatttttaatttaaaaggatctaggtgaagatcctttttgataatctcatgaccaaaatcccttaacgtgagttttcgttccactgagcgtcagaccccgtagaaaagatcaaaggatcttcttgagatcctttttttctgcgcgtaatctgctgcttgcaaacaaaaaaaccaccgctaccagcggtggtttgtttgccggatcaagagctaccaactctttttccgaaggtaactggcttcagcagagcgcagataccaaatactgttcttctagtgtagccgtagttaggccaccacttcaagaactctgtagcaccgcctacatacctcgctctgctaatcctgttaccagtggctgctgccagtggcgataagtcgtgtcttaccgggttggactcaagacgatagttaccggataaggcgcagcggtcgggctgaacggggggttcgtgcacacagcccagcttggagcgaacgacctacaccgaactgagatacctacagcgtgagctatgagaaagcgccacgcttcccgaagggagaaaggcggacaggtatccggtaagcggcagggtcggaacaggagagcgcacgagggagcttccagggggaaacgcctggtatctttatagtcctgtcgggtttcgccacctctgacttgagcgtcgatttttgtgatgctcgtcaggggggcggagcctatggaaaaacgccagcaacgcggcctttttacggttcctggccttttgctggccttttgctcacatgttctttcctgcgttatcccctgattctgtggataaccgtattaccgcctttgagtgagctgataccgctcgccgcagccgaacgaccgagcgcagcgagtcagtgagcgaggaagcggaagagcgcccaatacgcaaaccgcctctccccgcgcgttggccgattcattaatgcagctggcacgacaggtttcccgactggaaagcgggcagtgagcgcaacgcaattaatgtgagttagctcactcattaggcaccccaggctttacactttatgcttccggctcgtatgttgtgtggaattgtgagcggataacaatttcacacaggaaacagctatgaccatgattacgccaagcttttatttgtatagttcatccatgccatgtgtaatcccagcagctgttacaaactcaagaaggaccatgtggtctctcttttcgttgggatctttcgaaagggcagattgtgtggacaggtaatggttgtctggtaaaaggacagggccatcgccaattggagtattttgttgataatggtctgctagttgaacgcttccatcttcaatgttgtgtctaattttgaagttaactttgattccattcttttgtttgtctgccatgatgtatacattgtgtgagttatagttgtattccaatttgtgtccaagaatgtttccatcttctttaaaatcaataccttttaactcgattctattaacaagggtatcaccttcaaacttgacttcagcacgtgtcttgtagttcccgtcatctttgaaaaatatagttctttcctgtacataaccttcgggcatggcactcttgaaaaagtcatgctgtttcatatgatctgggtatctcgcaaagcattgaacaccataaccgaaagtagtgacaagtgttggccatggaacaggtagttttccagtagtgcaaataaatttaagggtaagttttccgtatgttgcatcaccttcaccctctccactgacagaaaatttgtgcccattaacatcaccatctaattcaacaagaattgggacaactccagtgaaaagttcttctcctttactcattttaataaacctcctttctctagaccccaagaagctaattataacaagacgaactccaattcactgttccttgcattctaaaaccttaaataccagaaaacagctttttcaaagttgttttcaaagttggcgtataacatagtatcgacggagccgattttgaaaccacaattatgatagaatttacaagctataaggttattgtcctgggtttcaagcattagtccatgcaagtttttatgctttgcccattctatagatatattgataagcgcgctgcctatgccttgccccctgaaatccttacatacggcgatatcttctatataaaagatatattatcttatcagtattgtcaatatattcaaggcaatctgcctcctcatcctcttcatcctcttcgtcttggtagctttttaaatatggcgcttcatagagtaattctgtaaaggtccaattctcgttttcatacctcggtataatcttacctatcacctcaaatggaattcactggccgtcgttttacaacgtcgtgactgggaaaaccctggcgttacccaacttaatcgccttgcagcacatccccctttcgccagctggcgtaatagcgaagaggcccgcaccgatcgcccttcccaacagttgcgcagcctgaatggcgaatggcgcctgatgcggtattttctccttacgcatctgtgcggtatttcacaccgcatatggtgcactctcagtacaatctgctctgatgccgcatagttaagccagccccgacacccgccaacacccgctgacgcgccctgacgggcttgtctgctcccggcatccgcttacagacaagctgtgaccgtctccgggagctgcatgtgtcagaggttttcaccgtcatcaccgaaacgcgcgagacgaaagggcctcgtgatacgcctatttttataggttaatgtcatgataataatggtttcttagacgtcaggtggcacttttcggggaaatgtgcgcggaacccctatttgtttatttttctaaatacattcaaatatgtatccgctcatgagacaataaccctgataaatgcttcaataatccatcctccaaagttggagagtgagttttatgtcgcaaatattaatgtttctggtgaaccttatcaaattttcgttgatttaatagaaacatagcggtaaaattagcagtaacttaatagaacggaaatgaaaaaagccactctcatatgctattggctaccaacctttagcgagaatgacttaatcctgtacagccatacaggacttcgacttataagaggcgccaacttcaaataagttatttgccttgttttcgcgaacaaggcttattagatacacctattgtaccgttactctacgaatatttcaactagtaattactagcattgtcatatacataataaaacggatataaaagggcgttttctatacctagaagtcttgtaaatgtacagggcgtttagatatagagaacgccctttttgtgttccgttccagtggaagctaccactttaaaaagatggtctagtgtagccaatgcaggagagtacactcggatatcagttgtcgttgcattcaactgtctgacgtaagcgaggtaaaggacacaagccttgcataaaacaagcctacgggatgtaaatcctaataatgatgataaccaagacgttagcggcaaaaagtgttgggggttcaaaataagacatgattgtgcgactggagttaaacagttactcgtaagcggcgatcatgacactgattcacggctattcttgtacaagctagctttattacaaggatatgcgggttatatagcgaatcacccgaaagggaacggtgttgggcgtgagaaacgcaccgtacggcgcaatacaatgccaataagctatatacggacggtatagtagttttgtaagctataaccgtttgtcgtcaatgcaaccaatctcaattcgagacctcggcatctaagccagtacgaatgagtgggcgttttaacctcgtaaattttcaacaggggttactatgcccaaaactacattcagatttcctaacaaactcgccagtatgaaaaccttaagaccttaaagtcaagggatttgaaggattttaacctcgattagcaaaaaatgtagagtactgaagcaactaccattaactaagatagtgggggattgaggaagaatccagagctgtttaaatcaagtgaaagacaagatgaaattaaaagaatagtgaaagataggggagtggttctctatgagaaaggaaatggctagagaacaaaggcagcggtttattgatctattgttagactttatggtaaagaatcctcatttatttgttaatggtacagaggatgaaagtaataatgttgttacaaaatgtaatagtgatattaaagaggttgcggagtcatatttaactcttttatagtgagagggttaaaactaattaatatgtattaaggcccaatgttggaattattgtatttcactaggcaacctacttactaaaagtaagattatccattagtggatgttataatattgggttttttaacacaataatcatcgcctttcggtgtcgtttgatagaaaagtaaccattagcgatgaaaaagtcaatataaaaagccatccgtaaaaaacggatggcttaccgtacataggatcgttggtagggcggcgtatcctacatctctggtaacttacctagccaatcaaatgcttgagaacggcggttagataagcgcgtggggaacctttcccacctcaaagatcctatatcattattatgttactttctacaggtagtataccatgttcttatattttagtaaactccccgttagcttaacaggtctttgtaagcaattaaacgtccactattcaatcgtctttggattttcgcaggaccgttttttagatcgaacatagttgataagaacaaataaccgcttgggtccaactttatagcaattagtatatggtcatttaaaatctttaccaattcaacgctattaggttctttaggattttgcccgacatagtcggggtgttcaacgatatcttttatgtgcgatgaatatttttcataaataccaggatgttgtttctttacgtgctttataaatccgggaaacatttttacatcgttagaagtgcaagtcaagttatatgtatctataatgatttgtggaagttttgccacaacagttggtttatttacaatcttttttttattagccgtcaaatttctccctcatctcgtctctttatatctttattttatcataaaggagtatttgaaccgtcgcgcgggacaggtttatgatagggatattttattgaataattgatggtataagggactttcatgcttggaaagtggggattatgaattagatgcttgtccacaatatgttccaatgtaattaaaatttatgttcccaccttgaccaaacatcacgtccatacttaaatcgtccctcctttaataggtaaaatattaatttaccttaataaaaaaataatggataatagtattcgtctgaatttatataatcagggggaactattgatgctggggatactatttacagcggcgccatctactgatgtcgtaaaggatttgcaagataaagttatatcattgcaggatcatgaggtagcgtttttgaacaccacgatatctaatatgttgatccccgaagcaaacttaagagtgtgttgatagtgcagtatcttaaaattttgtgtataataggaattgaagttaaattagatgctaaaaatttgtaattaagaaggagggattcgtcatgttggtattccaaatgcgtaatgtagataaaacatctactgttttgaaacagactaaaaacagtgattacgcagataaataaatacgttagattaattcctaccagtgactaatcttatgactttttaaacagataactaaaattacaaacaaatcgtttaacttctgtatttatttacagatgtaatcacttcaggagtaattacatgaacaaaaatataaaatattctcaaaactttttaacgagtgaaaaagtactcaaccaaataataaaacaattgaatttaaaagaaaccgataccgtttacgaaattggaacaggtaaagggcatttaacgacgaaactggctaaaataagtaaacaggtaacgtctattgaattagacagtcatctattcaacttatcgtcagaaaaattaaaactgaacattcgtgtcactttaattcaccaagatattctacagtttcaattccctaacaaacagaggtataaaattgttgggagtattccttaccatttaagcacacaaattattaaaaaagtggtttttgaaagccatgcgtctgacatctatctgattgttgaagaaggattctacaagcgtaccttggatattcaccgaacactagggttgctcttgcacactcaagtctcgattcagcaattgcttaagctgccagcggaatgctttcatcctaaaccaaaagtaaacagtgtcttaataaaacttacccgccataccacagatgttccagataaatattggaagctatatacgtactttgtttcaaaatgggtcaatcgagaactagcttcaaaaatccgtttactgatattaaaggacatttgtttgaaaaagaaatcttagcacttgctaaagcaggatttgtaaatggatttggtgatggaaagtatggtccagatgatattttaactcgtgaacaaatggcacaagcacttacaaatgcttttaaatttaaggcaacgaaaacaacaaaatttgcagatgttgataaaaattcttggtcttacggtgcaattagtgcattagaggaaaatggggttacaattggtactggaggtaatatgtattctccaaaaatgtttgtaacacgtgaagcgtatagtcagttcttatataactctattaatgcagttgaaaaagaaacaaaaccagagccaaagccagagacaaaaccaggggtaacgccaataggtattcccaatgcgttagtgacagatgattttttctttgatagatattcaattgaaatttcatctgtaagagagcgatctatttctaaacaaggtcaaaatcttgttactgaagtaaataagaagtataatgcgaatttcagatatagatatgtagcatcagaaattgatctatatactcctaatttaccaagaatgattgactctcatggttcattttcgtttgttgggaaggatgaagataacttctatttcatgtttgtcgttgacaaatcaactgttgagctagcgaaaaactggatgcatatgataaatccgaatttcactcttgataaagagattgatagattagtaaatccaaatccagaattaaaaaaagaaattgatagttttgtaaaaaatgataaggattatatcaatcgttttgaaaaagataatcatagcgtagaattaaatgtaagtcctctacagtgggtaaaacctggggagtctgtagttactctacatccagattactatgtattaggaatttctgtacaaggaaagtaatatttaagtagtgtattgattttcgtacagtgaaggatagacaatattagggcttattgattttttgaaaaagacctactgttattgaagtgcaccccaattgttagacacataattaacaattagaggtgcattttttttatatgttttaactgtatagattttttaaacaatagatactatttcatttcttttgctttaaagatggagcactctctttttctcgtcagcgtttgaaccaacaattaaaacatcttaattcctttagcaaggcttgtaaaattccaaaagttcaacaggaatattatttttgtatgctatacatgcttttgtatcaccacgctgaatggtcttttggtcaattaacaaaagcgcagcaaacgtatttgcttctatctctaatttatcaacggaaaagaatgtattcttacgcagaaaaggtgtatttgcatgagtatgtagaaccgcgtgtcctaattcatgggcacaaacagttctctgcatagatggagataaattagtattaataacaatgaaacgatttcttttttcatatttataaaaaccatttatttcttcatgtaaatcccatgttagtacatgtatttttaagtaatctgcaagctcatagggatttttcgtgttgtatttggtgcaaagttgttggactagatctctaatgacgaatttcaatgttttccctcctaagcttgcatcagttatcgtctggattacgatatttcttaggcacgtattttttattgattacttttgtttgttttacaatgtactccatcgcatctaataatgactctaccgcttcttgactcataggttcaccagagaacattaagccatcttcgccttgtagatctttctttatttcttccattctttttgctatatctttctcatcttttggcgttacttgttcgtttggttcgcctgtaacagatcgaccaagtaaatagtcagctgaaactgaaaagcaatcagctaatttagttaaaacatcatgtggagggaacctctcttctgattcgtagtaacctatcattctttgggatacgccgattttttctgccagttgtttttgagttaaattctctttttttcgtaaggattttattctaagtcctatcacatcgttcacctctctaattgaactaattgttctctttgaattcattttagcacaaaaagttcttttatgcattgacaaagaacaattggttctttaatctgtatttagaactaattgttcttatggaggtgtgataatgggaaataaaatgtacgatccgaaaaaaaacttatataaagaaattgctagctattgcggagtaactgaacgctatattcgaatgattgatcaaaaagaaagaacgccatcaatggagacagctaggaagattgcacagttttttgataagagtgtagatgatattttttttagtaataaatcgaactttaagttctttttaaccgcactttggtttaaaaagtgtggaaagtagattttgtcatggagaagttaagagttgcaataagtaagtaaaaaaggtttgaaaatatgagaggtagataatatggggattttccgagtaaaaaaagataataattattccgttattaataataccggtctaaaggataagaggctttcttggaaggcgaaaggaatattagcttacatacttacacttccagatgattgggtgttttatagagaagaattatcgcaacatgcaaaagacggtattaatagcttaagagctggaatgcaggaattaaaagagtacggatatattagaagatttcctgttagagatgaaaaaaacaaaattgttaggtgggagacaattatttacgaaatcccagtggatgattatccaccagtggaaaacccacctgctggaaaacctgttgctggtaacctaccggtggataatcacaagctactaaatactaatatacaaagtacgaaagaactaaatactaatatacaaagtacgaaagaactaaatactaatatacaaaatataaatcatattcatgataataaacaaagtttactctcaaaaaaattaacaaatgaagattttaaaataagtcatcaatttttgatgaagaatagaatttcattaagtgaaatagcaattatagagcttggtgcattttgtgaatcactaggtagtgaactaattggggaagcagtaaatagatcaattgatgaaaatgtaccaaagtggagatatgtacgtgggattcttaaaaattgggaagcaaaaaaggtaaaaacactcaaggatgtagctatgctagatgcacagtttgatcttggtaagaataaaaaacaatttgggtcagggaataccaatcgaaatgaaatggtaccagaatggttacatgaaaaagaagatattccagaagagcagcctataaaaaataatgagttaactattgaagaagagcgtgagagattaaaaactttattaaaaaaatataaatcataattaatatttataaattttattaaattgataataaggttagattatctttggtgataaaaataaaagcagcatttaaataaagaaaagtagggggattattatatgtttgactggctcaaagattatcagaaactagaagaagaaattgcatatttagaatataacttagacaaatcaaaagcagaattaaagcgctggactagtggggacttgcaaaatatacgattaactgctgaatcggaaggggctaaagtagaagatcggattgaagctattgaatatgaattaggacataagatgaatgaagtatttgatttaaagattttaattaataagtttacaggattagatcatcaaatactcaaaatgaagtatattgatggaatgaccttagaacaaatagcgtttgacttgcattatagtacaggctatatccgacgcaaacatgctgaaataagaaagattgtcaagtttgtagatgggttttaatgttacctttttgtaggatacatgcagtgtacagaaagtattgaaaaagtgatttatagtagtaatataagatttcgacgaaagggcaactatttttatggttgctctttttgttgtgaaagaaggtgagcaacatgaagtaattttaaaaaataattttcatttaagtgttagaggtacttagtagattaagagttttatagaaaaaataataggaaaataaggagagatttagtaatgagtatattagctgcttcagttaaaacaaagaatctgccacaacaagtgttacgttggcaatcaatggtagaaagtgaatgttcagcacaaggtgtgtctgaattagttccctatgtacttgggattattatggtggagagtggaggaaactctgaaacaacacctgatattatgcagtccagtgaatcacaaggttgggcgatgaatacaattaaaaatcctaaagattcaatttattatggagtaaagcatctaaaaggagcttttgatgatgcaaagaaaaatggcattacagatttaagtgccattgttcaatcatataattttggacgagcttaccttcgctggttagcttctaacaataaacaacattcattaccggtggcagatcagtattctaaaacggttgttgcgccatcacttggtaatacaactggtgctatggtcaagtatagtcagcctattgctgttgcatataatggtggctatcgatataaaaatggagggaatttcttctactctgaaattgttaaacaatatgtagattttgatgaagctggtaataacaataaaccaatacaaccggtgggcttggggattgctgtaaataaatatccgaataacggtggtattaatctatatagccaaccacaaggtggacattttacgagagtaatttatgataaaacaccgtaccttattatagatgcagcatggtttgaaaatcctatgatttgtctcggaaacgaggcatgggctgctctggaacatttcgatgtgcaatggttcagtgcttattcaaaatatccaccaggtggcggtattaacacgtatgatggtcctaacggaaattatacaggttttgtagatgggtctgttccatatagacttttaggacgaaaagatggttatttggcgattggaaataatgcatgggtaaaagaagaacattttgatgttagataataacggggagcttttcgttcggttaatcttaagatttgaaaagctaaaatacatccaaaaaataataaatatagacagtgaacgaaggtgctcattcaagcaccttttttatattgtgtaaaaatagaaaggaagactaatatggcaaaatttatttatcctacagatacaacaagagtaacaagtggttttagaggaagtagaccagatcatcatggggtagaccttgctgaagcgggctatcatccgatttatgcagcagctagcgggcaggttagccgttcttatctttcatctagttatggtgaatgtattatgattgtgcatactattgatggagttacatgggaaactgtatacgctcatatgcgtagtggttctcgaacagtaaaagtaggcgattatgttacacaaggacaaactattggggttatggggaacacaggggagtctagtggccaacacttacattttgaattgcataaagggcgctgggatgctagtaagagtaatgctgtgaatccactagattatttggggaaaggtgacagtggcaacaatactgataaaccgatacaaccagtaggtcttggaattgctgtaaataaatatccaaataatgggggtgttaatctatatagccaaccacaaggtggacattttacgagagtaatttatgataaaacaccgtaccttatcatagatgcagcatggtttgaaaatcctatgatttgtctcggaaacgaggcatgggctgctctggaacatttcgatgtgcaatggttcagtgcttattcaaaatatccaccaggtggcggtattaatacgtatgatggtcctaacggaaattatacaggttttgtagatgggtctgttccgtatagacttttaggacgaaaagatggttacctgggtattggaaataatgcatgggtaaaagaagaacattttaatgtgagatagtattttgaaatctataaatatcaaattaaatggaagaagcagtgtgatacttttttatgaattcgtttaaaacgatggtgtaggagtgtagagaggaattaaaggaagagcaactgataaacagttgctctttttcttttttagcaggtgaagacaaggaatttattagagaaaatgctggccgtatggagattaggttactagatgtactaaataatgcagtgagaattttaagtaataaaaacgagagaataaaaaggagatgttcagtaatggagattagaaaaaaattagtggattcaagtaaatatgctataaaatgtcccaatgcaatgaagccagaattcatcacagtacataatacgtacaatgatgcatcagctgaaaatgaaatttcttatatgattggaaataataatgcagtttcgttccatgttgcagtagatgacaaagaagcagtacaaggtattccgtttgatcgtaatgcttggcatgctggtgatggtaacggaaatggtaatcgtaaatccatcggagtggaaatttgctattctttaagcggtggggatagatattataaggcggaagataatgcagcaattgttatagctcagttaatgaaacaattcaacattccaattagtaatgtacgtacacataaatcgtggagtgggaaacattgtccacaccgtatgcttgacgagggaagattggatcaattcattgagaaggtaaataaagcatttaacaacaataataataaaccaatacagccagtaggtctggggattgctgtaaataaatatccgaataatggagggattaatctatatagccaaccgcaaggaggatattttacgagggtgatttatgataaaacaccgtatcttattatagatgcagcgtggtatgaaaatcctatgatttgtctcggaaacgaggcatgggctgctctggaacatttcgatgtgcaatggttcagtgcttattcaaaatatccaccaggtggcggtattaacacgtatgatggtcctaacggaaattatacaggctttgtagacgggtctgttccatatagaattttggcacgaaaagatggttatttggcgattggaaataatgcatgggtaaaagaagaacattttgatgtgagataaggttaaagaattagagtcactcgtatgagtggctatttaatttttggattggagtatgattggaaatagaaaatgtcagtagtgttctatactaagttgtttttatgtatcgattcaagaataaaaggagtagtttagtgcgtaatttgtttatgttgaattaaataagaagtaggaaagaggtggtaaaatggatagtttacaagaggtgaagggtgatgttcaggaaataaggcaagatattaaggaaatacgattagagattagaagtttagaaatgcggacgacaggtaatgaaaaggacattattaatattaataagcaattagacaaaatcagtgctaatacaacttggatcctacgccttattattggtggactaattggagctgctcttaccttctttttgaaagaccaactatgagaagtcaaggggagttttttatataaatagggggtgtttttctaaaaaagggcgtgccaaataacacatgttgcgtacgagatgcaaaaaaagacctgttatagcaggtcaaaagtcagggtatttcgtgaaagaatataacttattcatcattctaacaggaaaaagtgaaaaataaaagattgaaaataaaaaatattaaatctttttgttgagaaatatcaaataccctagtagtaaagatatattgaaaaaatgttagatagagaagggggactggaatgaataccaatgtaataaaagtcgcaagaataaacctgcaaggtaacactttagaccagggctggtttaagtaccttactttagaaaatggcaagccctatatggttgcgattacaatacttagcgaaattttttattggtataaaccaactgaaataaaggatgaaagaacaaatgaaatccaatataaacaaaaatttaaagcagacaaacttcaaaaaagttatcaacaattggctgattcatttggttttaccaaaagacaagtacaagaagcatgcaaatacttagtaaaaagagaattaattgcaattgaatttcgtacgatcatagttaacggaacgaggcataacaacgttatgtatgtggaaccaattgtgaagaacatcgaaaaaatttctattttatatcaagaacctatcacatcagaaagtgacaccctcccacattctaatgagagaggctcccacactaaaacggaggaggctcctacattgaaacgtgggacaaatacaaagattactacagagaatactacagagattactacaaataaaaagacttcttgtcacaagtttgaaacttgcgacatggagcatgccaaattgttattccagttaattttagaaaccaatccagaacataaagagccgaacttcgagaagtgggccaatgaattccgcttaattcgcgaaagagacaagaaaacaaatcaacaaattgtgtatctcttggaatggtctcaggatcattccttctggaaaaaaaatatattgtcacctagtaagttgagaaagcaatgggacaggttagtaattgaagccaaagaagaacacgaggtgaagaaaaatgagcagattcgcaagcatagcggaagtcatggcagatttgcaaaagagggctatgaaaaattgccagaaccaacaaaaaagtggagagaacttacagacaaggaacgagaggaatcacaacaagaatatgaaaataacattgaatggctcggagaagacgcttaatgatacctgtccgttatgcagtggaacgggaatgatcttaaatggatggacaggtagaatgtgtgattgccaaaagaaacaatctgaaatagcaaggttgaaaaatgcaatgataccagaagaatttgaagaagcacgttttaaaaattatattcgtcataccgatatgcaaaagaaaatgtttaacagcatgatggaatacttaaaaaagtttaatgaaatcagggatacgaagcgcaatagctttggatatatcgctacatatggcgagggaaggttaaaagccttatccatcaatgaacgggttgagaaaatgaaacttcacaacaattacggattaggtaaaacgcatctacaaatagcagctgctaggtggattatacaaaatgttcaaactgtaaataaagacattgtaaatgcacaaccgagagggtgcagagtagtttgtataagtgatgtcacttttatgacagagattatgtcagcaaagcgtgatgataaaaaggagtactttgaaaagctccatacagtcgtagagtatgcggatgtgctggtttgggatgatctaggtaagagcaaacatacagaatctcgtgaagaaatgtactacgaaatcattaatgagcgatataagcgtaaagcgcccatcatttttagctcaaatgaagatgaatataccttacctgaaaaaattgggtttgcagctgctgatagattgctagggatggcaaatcactatttgattgaagtcgagggagaaagttatagacggtaaaggggagaaatcaatcattttgtgggaatggagttgagtgtatggaacaattaacctttgaagatatcgtaggaaacatggattatacagcgcatagtacggctgagaaattcctctctaatcattcagtaacacctacctatgcagtagaattttttgaccgagatgaaaaacagaagttacgttggtttgaagtgaatacagaggctgaagcaaaagaaaaagcggtagaaacatacgggagaattcaaatcattaaagtatatgtgtccaatcgaacattgaaagaaattatggagctggactaagggcatttttatcaagagagcacatgcatttcctaaaatggacaagccaatgcaaaggagaacaggcatagatgaaaagagaaatagacatgaaaacaaacggcatttacattgtggtggatggaaaaatcaactttgaagaacccccaaagagcggctacggacagcaagtcttatattgggtaaagggaaaagtgtctcatacacaaacaacgattacgaagaagtttaaataaaacgaggtgggaaaataatgaatatacaagaagctactaagttagcgatggaacaaaataaatttatttcacgattacactttatgaagacctttaaggtcaagattaagccaacaaatacgtatgagttgtgtggaaattatccaatttatcctaacgaatttaaaccgcgcagggcgtggaatccctgcgcagatgatttaattgctgatgattggataattgttgattaaggtaaccatgatcttgcttcttttgcaaatttgtatccggttttaagagaattattctcttcacaatatgcaatcccttgtggaagtaagacagtgttataggcaacattgtctgctgcatacacagagactaaatcttcatctcgcaaacgatagagtgctttcgaaataaaatcatcagtctcattttggtacaactctttaaatgtttcaaaagagaacatatctgtcccatggtttttatactcagttaccatgtattttagtagtttttctgaaagcttagttattttcattaattacacctcccctctatagggaattatatcaagaaaattacaataaatgagaattttatggggaatttagtcgggaagcaagtcaagcacgtgtagatgtaaagtaagacaaaatttgaattttattaaaaaatggaggaatgaaccatgaatacagtaattattcaattcggtcaaggtacagaagcatggaaggatatgcgagagattacgaaatttctacaagagaaaggctatttcattgaaccttatgaagaaattggatctgtaaaactaactaagaaaatcagtgacgaattagtggataagaaaagaaaattcaattgtgatctttgctttcaaaataaggatattgaagagaaatcaatttatcaatttgatgaaggtggcgacattgtcgcatgcatggattgtgagaaaaaagcatttgaacattcaaaaaactaaaccaaagcgttattttgtagccatgtaaaaaaagtgcatatttaatatgtactcttgaaaaaaggaggcacttttgagagatgagacataatacagcgtatgctcgtctcaagtaaaagtgcatcgaactcaataaaatatttgttttggagggaaatgaaagtggcgaaatgcaattatgttggatgtgacaatgatgcaacaaccaaaggttttatatttgctagagatccacaaggcaggaaacatcttcctacagatgtatacgcttgcgataaacataaaaagtctctcagtttttttgaatataacactgctaaaacaaactaaattttgatttggaggagaacgtaatggaaatcaaagtgaatgagcaaacacaacgtttttatctagcgtttgatgaatgggtacaatgggtacctgcagttggtcatggaattaaagtgggacaatatcatttttgtgcaattccattaagtgactctattaatgtttcagaagtaacgtcaggtgtgaaggctataagtgtccctataaatttaaaggtttggatgttaacaagcactaaggaagatacaatgaggtttttagaaaaagttggtgagcatttaaaaataattatggaagaacgaggggattttgatgagttactcaaaaaacagaaaaaaatagctttcgaacgtttaggtgcgatgccaccgattgaaaatattgatacggattggatatttgaggaggaaagtgaagttgtacattaattgatacaaaatctttatttttaaattaaagagcgccttgtaaagctcctctgatacctaatcataatgaaaataacgagctcatatagggaagtatttataataattagggatcattatgttccagcttagatttctcggctggaggaataaaatgctcacggacaaagttttgataaatcataccgcttataaatgtaatataaaacactacacacaaaaagattaaaatgtatttaaatacctttttcaaattagcaccaccctaaaagagagttttaataggatgtgtaaaaaaaggtacgattatacaagggcggagcggttagcaagaataaaataaaaacgttattttaaatttaataaaaaaaagagcacattaatgtatgtgctctaggtaaatattttaaaaaaaggagtcttaaagaatttaaattgtcaatacactatatgtttgtcttaaaaaaatgtgcatgagataaaatagaaattttatttgggtgaaagtgaggtgtaggggctggaattagttttttggatagttatcttcattgtaatgggccaaattgcttgtacaaagatggatttacaacaatttttagatacttataaggaaatgctggttatacaaaacaaaaagattgatgacttattgagatatattaataagtgttaattagtagaaaatatttaaaaagaaggacccacattgagggggtgggtccttttactgaagccaggcatatatactaagcatatagagattaactatatattaccaaaaacgaattgaaatttctatgtgctaattgttgagaaataatttataaaagttttattttgtagaaaatcaacaaaataaaacgagcacttgtgccagagtgcccgttttataagatgacatcatttattatgttatgtttgtgagtcatgaacaattaaatgagtcgaaaagtaaggttcgaaatagtttatgtacctgttaataaataggtgcttgtactaaaaagaagtgaagaaatacaagggaggattattggagttccggcttatcgcccatgtatagtatgtgctatgtatgaaaggatattcagatttgcaaaaaataaaaagagcaccttcgaacagtgctctttcccggaagtgtatattacatggacttgcaagaggtttttaaggaataaaatgaataagctcgctcctgaaaggaagaagccatacaataacatatgaaaacgtcgtcgcaggagtgacaatgaaagtatttaaaacccaacaaaatgatccttttaagtggtatttgaatgtttttttgtaatttcatagcgaaaaatattttatcagaattggtaggatgcacaaatttactgtcgaattgatacatgaactagaaggagggagacagtatatgctatatcatttgataaaattaggggaagcattagaatctgaagtaaagcaatctgaggggagattatattttgattcagttaattttggagtttgggtgtcaaaaagtattttgtatatcgaaaagtatcataaagattcttttatagtaaatcaaatgaagcaaagttataaagaaatagattatacaaataattatacattttacaaattgatgttaagtacattgaaagtaatacaagaagaggaaaatgaagaaaaagaggaggctaaagcataatttataatcaattgaagggaaagtcataaggttatcatataagttttgagtagaagaatggaataaagtccggctagaaaactagaggacaccaattcattaaagcagcaattcaagctgttttaggaataggtgtccttttattttgagaagggagatggggagatgaaggtgttgagagatcaattacgtgaatggaaaagcaatcaaacaaaaaagaaaactaagaaaaaacgaaaagagaagttaagcactcgtcaaattgaggatttaatggaggggcataggccttgttatgaacgaagatatggagcaataagagaaaagtaatttaaaaataaaaaggagtggtctggaatgactaagcaattatctttcttaccaaaaatcgatagagcagcaacgcaagagcaattggaggggatgttggaaagtgtacgtatatataagcaatttggaatgatacgtaaggaaatgaaagtcactccttcttatgaaaggaaagagcatggtcctacacatgcagttggcaaaccgttagaagatgtagcaatctctaatattcaacaaagcaagcgtgaagaatgtttagagaaaatggcatttcgagttgaacaagcattaagtcgattcggaaacaatacagttggaaaaaaccagagggacattatagttaaacgatatttagaagacgaagatgtatgcgattatatggtatataacgaaattggcatgagtgaacgtacgtatcgacgtgtgaaagctagagcgttttataaactggcctttgctcttagactagaagtttatgaaactgaagaaactggagggaatgaatcatgaattttgtccagcccatacgtgattcagagcaaatacaacaaatcaaagaatatttaaaagaaaagaatgcacgtaactatattttatttgtaatgggaatcaatacagggttacgtatcagtgatattttaaaactaaaggttggagatttaaaaggtagtcatatctcaatgcgagaaatgaagacaggtaagcagaaacgcatacaaataacagcagcactaaagagagagcttcgatggtttaatgaaaatagagaagatgatgagtacctattaaaaagtaggcagggaaaaaatcggccaatcggtcgtagtatggcatataagatactaagtggagcggcagcagagttcggattagatgaaataggaacacatacgctaagaaagacgtacgggtatcacatgtacatgcaaacgaaaaacatagcattacttatggagatattcaatcattcgtcagagaaggtcacgttacgttatataggtgtaaaccaagatgcaatggataaagcaatgactaggtttaaaatctaatcattgcttttttctttttacatctatacagttactcataaatttcgtaatgtgtaactcaaaagagaaagtgaaatgaaatcaatgataccaagggttttggcgaaggggtcagttacacacaattaaacatatgggtaattggaaggtataaaatatgcacatgacgtataagaattatgtatgaagatatgtatacaacgatagaggcattaatatcgctacaataatcgaaaaaaagtcttgataatatggtgaaattcactccgtttgcagcaattcctgaacagtttgctgggatacgtgaaatcatcaaggagaaaaataaagtaactcggccgatcttaacagatgaagaaaaagaactaattgagaacatgttattatgttccttattatctgaagaagaaatactcattacatattatgaggatggttatttgctctctagctatatgactgttgttgatattgatccaccaaatagtgctgttatatgtaccgatgctttttataacgagatgaaactgcaattttataatataatagatgcaaaatagaatatatttacttaagcacatttagaccattataaaggagtgtaaataatgcaagaggctcaaataagaaaaagtgcagcaggagcaattattcataacgatataaatgactatccctatttaaatataccgatgattattaatgaaaaagatggaatgatttatgaagttctaggtgctggttttcacactaatgatgctgtagcaataataacaacggatgattttgctacaaccagggtaactgcgcctcttataacagtaaaaaacaatgatggtagtattcaattatatcgcttacctttagaactagaacattgggtactttcttgtatgcgtgctgcttcagtaggaaaaaatccgtttccctgtaaagttgctttcggaatcatcgatactaaattttatgtagaatttatataaaaaaggtctgcttattcagcagacctaccatcaattatagctttatatttttttccttttcaatgtccaaataggtgtagaagcaaggatctggattggctcaggtaataacggtcttactttcttcccatctcgttgtcgagaaaactttgtgcttaaacgtgctttatcccaacctagtatctcagcaaattcttttaaaccaacgagaaggggaattactcccccagttcatcgctccacacttgataaaagccgccaccaaccgtttcaagtacattatcatcctcttgtggggatattccataccaatatgaggttgttatgacttcgccatctaaagtttcaattgtgattttttcttgcgtgtaagctataccttcttcagcaacttttttcgcttcacttaaatcatttacttcaacttcttctgttacaccagtatgatagtttacaatgtatttttccatttataatatccccttcaaaagtgataactttgttaacactttttaggataattcatttaattatttccttccttttaggaaagagaaaatccatagcttctacagttaaaatccattctccacgttgttttccttcaggcttgtagtatttaacttttccactctcaatcaatgcatctattaatttattatcttttcctcgcttcaatttcattagcagcgcttcttgtataatcccccaacgatcacacgcctctcttggtggcataatttcatctagcataaataacatccccatcacctctcgttacctataagtaacgttcaaccggataaaaaaacatgatgaattctacatgcgtgtgattggaaccataactttgcccaaacggcaaggttatggttctttttgtttgtggcaaagttatggttccaaaaataaaatgtacaatcaacttaataacaagttgccccaaaaacgataaaaatgaactccattgttataaaggaatctaattttttgttttgggggtagtatagaatattaacttgattgtgatgtggcgctaagcttataagggatcactatatttaaaaaaattgtacgtttagacacggtttggcaaaaaactaactgttttcttgtacattaataaaaactacagtaaaagttgtagtttttatgttttcattttcctttttgcattcatcttttacttagatgaatgctttttttagtacataataaaaaaaaacggaaaaagtgtcacaaaatccgtttttctggtttctatataatacaggcatcaaattgagagtgaggttttaactaacatgttaacaatagaaaatgaagaaagtcatgcttctgacatgacttttgaagatttatttaagcagtactatgcttacgctgtgaaacaaatcatatggattgttaaagatcaatctatcgctgaagagttagcgcaagaagtatttttacaattatatcgtagcgattggaaagcaatcgaaaacatacctggatggctgattaaatcttctacttatgtagcgtataaccatttgcgatctgaaaaaaggcatcaagcgaagattgataaggaaatacaataccatgacgtacaaaatgtctcatcattagacgatgattggataagaaaagaagaaattacaaaagtccaaacgatactaaataaaatgaatgagcgagaacgaacccttttactaatgaaattctctggttttcaatataaagaagttgcagaaatacttcaaattgaaatatcttctattggaactttattagtccgagccaaaatgaaatttcgcaagatttataaacaaatggaggaggcataacaaatgaaatgttatgatatcggatttattcaaacatatattgatggagaactttctcatgatacaagaaaagaatttacaaagcacctagatacatgtgaagcatgccaagatttattagtagaaatcagtaaattaaaccaatgggagaatgtaatgctatatgaagaatctgcacattcaccacaagaaatcaaaattgacgtagaacaagcatggaaaacatttgaaagtcgttcaaaactagacaatgtttctaatataaatcataaaaaacaacaaaagaagggaatttttacaaacatgaataaaaaaacaaaacgtttcatttatacagcagtagctgcagcaggactatttacaacagcaatgattccacaagtacaagtggcggctacaaatgttgcctcgtatttttctgatgcaattacaaatgataaggttgtaaatgaaggaatacaagacgaaaatggtgtcacacaagatacgatgaagaatggcaaatatattcctattgatgaaaaaattacagatcagggtattacagtacatttcaaagaattatatatcgcggattcacgtatatcagttcattatagaatggaaaaagcagatggaagtttagtaccatatgaatttgatacagctggagtagatcttaagagtgatggtaaggtcaatggacaacaagaggaacgacctgaacttaaaaatggatcattaatatcctttatacaagataaagatgattatcttcctttcgaacttatggcaacaggtaaaaaattagaaacaggcattcgtgataaagataaaccagaaggcgttgttacatttgttgtaaatcctgaagaaaaagacgcttttaaacaaccccttacattagatgtaaatataaataaaattggaaaagtagctggatcttggaaaggtaagattcaaattgatacttcacatttaaagaataaaaccaattaacatgaaaaaaagaatagcacaatatgtatctaatgctcggtttatatgttttcttgtttttgttacatttatttcttatatagttttcactctatcttttatttatgatttaagtttataaacttaaattaatcatttaaaacattataagataaaaacttcataaaaaagctgtaaaatcaatagccggttccttaatgtataaggaaccggttagtttgtgtctaaacgtacaatttttttgatatggtgacccctactaggggtagcgtcaggaaaatgcggatttacaacgttaaggaaattcccttattaaaaagcctaatttctcaacatttatattgagaaattaggcttttttcgttgctccgttaaagcgccctattttggaagatcaagataataattactgccaatagataattgaactaatgctcccgattatggagcaaatcactatcaaatccttcctttttgttcattatatatactccaaataaaatgatgatcatggcactccaatcacttatcaaaatgatttcgtttgctaatagtgcgccgattaataaggatattacaggtggtatataagttactgtggaggctattattgcccctaaattattgacgagaacataataaagaatgtaagctagccctgttcctagaactcctagtcccactaatacaccaatcaacgcaactgagtctgattgaatattctctatactttgtaaatccccaaagagaccaagtataatgattgcaatggccacctggtaactcgttaaagctgcgggagaaatattgatttttgttaaatatttttttgcatatacaaaagaggcaccaacactgagagaccctattaacatatatatgacacctttaacgtcaagagctgtatctccgtttttccatggtctcgcaataagtaacacaccaattaatcctacaataactccgactactcttttaacagttaccttttcttcttttaaaacaaagaaggtcatgattgtagaaaaaatcggtatggacccacttaaagccccagctattccagaattcaacaatgctgtgcctttcgcaaaacaataatagtaaatgatagttgcgaggatagacataattagaaagtggtgtatatattttatatgacttaactttatttgacgtttaataagtgcataaagaaatacaggaataaaaccggctaaaactcttagaaacacaatttgtaaaggatcaatatgaacggcggcccatttcataaaaagaaaattagtgccccaaataaccccgagtgttagataagctatataataaacgttgaatttcatttgtgtctttagcactttttactcccctttcacacttcccttttttcttctttttttgtataagaggaagacgataagaagtttaatgtttcatgtaattgatcagctgcataaaaagcttcctggtctttggatatatctccaggtttatttcctttcccaataatatatccttcaaaaggtagaccaacaaagtcaaagatgtagttgaattgctgaattaatggtaatccttttataaaaggagaatctcccccaactgcaactacataggcctttttcttagacatgatttttcgaaagtctttatattgaggatctctcatcgtttgggaccatcgatcaataaagttcttcattgttcctgtcatactgtaccaataaatcggtgtcgaaaatatgagaatatcgtggtgcaccattcgatatattagggagttataatcatcaccaacatcttgaaagccgtcttcagtgtggcgcatatcatctattggtttaatattgtaatcccttaagtaaatggaatctacttcgagatccttaatagaacgtttagttaacgtctctgtatttccatttgggcgagtacctccgtaaataactgcaatactcataattattccactccttttttttgactgtttatgatttatagcttaaactacacatataaatcagtaaaacagattattccgtttggttcaatcgatatttccgatttaggagggagacgaatatggatattaaacaactcatcacttttaagacggctaccgaaactcttaatttcaccaaaacagctagtatattaaactttgctcaatctagtgtgacagcccaaattaaagcattagaagaagagctagaaaaacctttatttgaacgcttaggtaaacgcctaacattaaccgaggcaggaaaagaatttaaaatctatgcggaaaaaatcattaaactaaatgaagaagcaaaaatggccatcagtggaaataaagaaccttctggcacccttatcatcggagcacaagaaagtcaatgtacttataggttacctaccatattaaaagaatttaaagatcgataccctaatgtaaagttaatatttaaaccagctcattccgacgagttagctagaaagcaactaatgaatggtatgcttgatattgccttcattatggatataacgaaacctgaagaagctttaacgataaaacctttgatacaagaagatatcaagatggtggctgctccaaaccatccattagcttcgaagtcagaggtttatcttaaagatattgagcatgaaacactgctattaaccgaaagtggttgctcctaccgtactcttttagaaaagtcttgtcactcagcaaaagtctacccagtaaataagtttgaatttggtagtatcgaagccataaagcaatgtgtgattgcaggattaggaattgctgcattacctacaatggttgttgaaaaagatattaaaatggggagaatggtggaattaaaatgggataataatattcctcctattttcacccatatcgcttggcataaggataaatggatgactcctccattggaagattttattgaattaactcaaagaactttcaacagacacaagatttaaacataaaaaatcgctaagagtttgttaaacctagcaattttttcatgttaaccagaataatcacttactggaaaaaagaagcatcaaaaataataaaactctaaggctatcccttgccttagagttttattctatcttattcaattatcgggtgcttagtttaaatacactttttacaaactctatctaattttatcataaacttccttaatcattccttactccattatatggcccttaatggaataaggaacgattattgtttctcttccgacagctttctatatatggggaaattaggtcttagctacagccttacgcgaaatgggaagaatagaaaaaacgatctttattcttaattacatatcggatgaaactttaagaagaaaaatacaaagaggattgaataaaggagaagcgatgaatggactggcaagagctattttcttcggaaaacaaggagagcttagggaacgaaccatacagcatcaattgcaaagagccagtgctttaaacataattatcaatgctatcagtatctggaataccctacatctaacaaaagcagttgaatatcaaaaagagacaggtagttttaatgaagacttattgcaccatatgtcacctttaggctgggaacatattaatttactaggagaatatcattttaattcggagaaagtgatctcattagattctttaagaccactacaactttcttaacgttgttaaaaatgggggaatcgtcttggaaaagagcttagcgttgtaaatccgcattttcctgatactaccccatgcccatcaacttaagaatttgcactacccccaagtgtcaaaaaacgttattctttctaaaaagctagctagaaaaaacggtgcaactttttaacgatatgaaatatctatgaattaaatatgcgagcaaagttttttcgttttcagttcgtcatagaggtactatataaactccctaatttcggaatacagaattacagagaaaacggaaaacaaaaatttcaaaaatcgaaaaatcaagatttcaaatttaaaaatttttaaataaaatcccacaccaaaaatccaaaatcaaccccaaaaatgtagaatttctattttcaaaaaacatcaaaaaacgtgcggtattttatcgatatagatatatctaaaaaaattcatgcgcacactataggtttttaactcgtacagtagtaaaacgaaatcatcagaacaaaatatatctcgaaataaactttaaaaataaattcacaaattcacaaatttaaatttaagaaaaaactcttttttgttaattctctgttagatcataaaaaccttttgaatgctacttgctgcactcagaaggttttctttcaatacaaaaaagagagaaccaaacttaatattaagactggttctctctttgtcattcaaatatcatcaaccgcaccacatttttcacatttaacctagcacttatatgagtaatatacatcttcaccatctttgaccttactttttgaaatccgataaattttcatttcttcgttataacattcccaacaggtatgtttaacaatatcaccttttttatacaaaactattcaacctccatttcatcaatcaaatgaccgttatattcttgtttctcactttccgttaactcttgatattcttgttcaaatttcattaaatccttattccacattgcaattaatctataataatactcatttttatctgtactcttatacttgtccaattcgccatcttcgtattttttagcataatcttttagcaatccaccgtacacaattaattgtcgaccttttaaagctaaataaaacacgtcgaacacatcttgactcactgacatttcataatcttttgctgaatacttcgcaacctctgcaactgcatttccttctcgaattaactctactttttgaatatgtacttgcgtaatctctggcatatctgttacttctcgccacatttccaaccattcttcctgcttaatataaagctctttacgtttaaaataatttttttcaacacaaagtaatacatggaaatgaggattatatgtatcataattcgggttatgatcgtctactttcaatccacgagaatcataatatgcttttctctttttgttgttatacatttcttcagtgatgaatcgttctttatcatacgtcatttctagctttctaatataacccttaatagaacgttgaatattacgtctcttaaataatttattaaaagctttattaaatctatcaatctcgctttttaccgtatcagctttaatattcggagttgtcaatgttaagaaaagaaactctttcttttcttcaatcttgattgcttccatcattgttgcgattttcaccgcgtccttccctgcttttctccaagcacaaatcggacaaaatcgatttttacaatcattaccctttactcgtttctttttctttttatctttcgtagccacaaactcattaaaagtactgcacgatttaaacaattctctcccgctctcactcattttcttctctataaattcataaattcttatattctgtttctttttaggttgtaatttaccagtgatttcatcttgatttttctttgtcatgtttgatatattagtcctatatgaattgcttaaaaaagggtacacgaatccctttttcggacttgctccttccttggtagttattgtttttaattcgacactaaaaatgataaatctacccgccggaaatagcaagtcttttttttcgaaatcccttgtgtatcaagggataaaagaatacataggcatcaatttccgtgcggaaatagttacctatgtattaaagaaagaagaaaaccgtatttttcgtgtccgaaaaaccataaaaaaatgcccttcaatccacttcgtggacaagggcattttttcttttaaaaacaaaaattattcctatctctcagcctcttcattttcacttctaagcgtttttcaaacaacttataatattttctctttaagaattacacatcaatcccctatacctcaaaaacatatatttcagaacacgttcgaagtgttgccatgaaaaaatcgagaaattctcgaactttacctgctaattagaataacaggtaactccctttacactttctttgtctaaataaaacaaattcaagcaaggctctacaatcttccctatcttttgcaatgaaatataaatttgtttacatatttctaaaaatgagtataattgtattgacggttaatacgttataactgttataacattctaactaaacgtcataataatacagaaagactaaacacaacaaacaaaagagaaaactaagaagaccgaaaaaaccaaaagcaaacaaacaaaacaaacataaaatcacactatataattcgaaaaactcaatacaaacacaaagtggcaattagactacgacaaaaaatagtgtggcaaattccaaggaggaagtccaaatgacagcaaacactcgccacatggaaacacaaaaaatcgaacgtaaagttactaaaatcggcaattctttaggtttaacattaccgcaagaattttacactactctaaatatcaaacaaggtgacgttgtaagtttagaaattaacgaagaaaacgaacaaatcgttataaaaaaatccaaaaaaatttctatgccagaggatctcaatcctaagttcttggaatcgttaaacagaaccatcaataaatttgacggtgcatttaaagatttggtaaacagataattatccttcaggcgtggaggaaagtaggaaaaccgaaatgacaatttatataacagaaactcaagctatttttatcaatgaaacacttatcgacatgtattcacctaatgaacaaagaggtgttaaagatacagggttattacaatcagcaatataccgtccacaacaaacagtagcacaagaggatgcatatccgactatcttccacaaagccactgcattatttgaatcattggctaaaaaccacgcattctataatgcaaacaaaagaacggcattagcttgcctagaaatgtttctgttatacaatgagtacgaattaaaaatgtccgaacaagaatcttcagatttcactgttaatgtagtagaacagagattatcttttgaagaaatcttaaaaattataaaagaaaactcatcaaaattacctttaaattagaaaaagacgtgggatttaaccacgtcttttttattaaacaaactatcttcaaggatgttatacaaggctctacaatcctcgctatattatgcaaaacaagttccgctaacgctacacatctaaagaaaaaagagactcacacagagcctcctaacatgccattattctttatcttccaaagatactaatacaacattttcattcatatcacgcaaacgttcacttatagctctcagacctccactaagtcccataatttgatcattcatttccttgataagttctccaattccagctaattgttcatccttacgatcataatcatcaattttcatcgtcaattccaaaatcctacatgtctcttcaatcgttaaattatttttcttagccaattcctttacagtacctataaacttaactccataactatgaaaatattccatccttggttgttgattaaataatgttcccacactatctctccaatccctggtcccaatttttctgttggcttcttcgtacttgttttaatctcttttgttgttcttcatgctcttgtttgtgattcaagaacttttgagcaccctttacttcatcatcaccagcaaaatgtcgttttaaaaacttgcgattcatcttgtccagtatactccccttaacataaccaatcacccctgcgagttcaggaagcttctccttatacatctctttcactcgctccaacgttttcttaagaaaatcatttgcttccttcaaccctcgattctctcttttcaagtctgttacttgcctttctaaaaaacgttgccccttatataaatcatctttttcacgttcaatcttaatcttttcatttttaaggcgtctattttcgtttctaagagactcagaagacttagctaatgattttatactatcgaagtcttctgaagcaatctcgaccattttagagcgtatgaacccgcctttttctttgactggaatctcatctacacttttcgcttgatctaaagacgatgctaaatcataaagacgactatctatttctttcttttcctgctctaacttctctatttcttgttgcaaactcaccgctttaaaccgctgcgtcgataaatgtttcctgtcgctagaaacaccacgctctatatcaaatcccttttccttcacatgttcatagattttatcttgtagatcatgaagctctgatttgtttttaaaaaatgaatacgctgatagtttttgtttttcattaaccggaaccatgcccacatgcatatgaggtgttttttcatcaacatgtactgaagcatatacaaagttctcttctccatatctcgcctttaaaaaacaaacagactcttcaaagaatcgtctctgttccgcttgagataaagaattcatataatcaggactagccgaaatcataaacgaacaacaaacaacagcatctttccgaatcgcacgattagatacaacaccattatcaattcgattttgaatgaatttcttataatccacttttcttttatcatgaataagatcataattctgttccgttcgttcttgaataatgtctgaatttgaatgactttctttttcacgctgattatgtatttgtaatcctttcacatctgtcatcttgaatttttgcatatgacaaaccatgaattttgacatgggcatcgctccttcttcggtcgtagttccatgtaaactgtagcacactacagtttactgcgtaaacacgtgtgccctacgggacatttcggcgaccgccgagccatgacaggcatggcaaaagaattatgggctttgcccaaacccacaagggaaactcttccccttgacccctttcaatcgaactccccaacccctcaatccttgagggactccctcgccggtaggcatccccaaaacatggttttgggaagaacaagagggtcttggtcgaagttacctatcaactccttaatgctccatcatttcgctatcgcttcattccgtccgcttaccgttgacaggtaccataaatactcctcccccttttaaaatctgacatccatatattaaaaagtctctttttatattcaccgccccaccgatctatgggaattttcttgtagtgaaataactacttcctctacaaacatatttttttgttttacaggaagagcttcagctttttctattctttcaaacaccccaaaaacattaatacaatcacattttctattagaatcactataagaatagccatagggtaaaactacagatattcgtatattcattcctagacccattcaaataaaaaagagcataaggaaaccgaatcccactttgtacaaaaagtggtgaaatagactgtgcctattgggtttctcatgctctacttcagggaagcgattttccctaaagtatgcgtcctctatacgtttaaaaacgtttagtatgtattctgcatgtgctttgcatacaccatgacaaataaaaaaagagccccacaaataggaactcttttttcattactcatcaattccaccatttcattttactgcattacgataatcacacataaagttaaacaaaatcacgaaatatctgcctacctctcatcttccaagatgttgacgcacctagcaagcctataatttcatttaccatattcatgtgataacaaacagaaaaagaaagaaaaagacagtcataaaagtttgccgaaatttaaaataagcatataaccctaccaaaaaccatatgcgaatataacctgttttccactagcaaatattaataccgatttcatcatacacaagctatctaaagatagaatagcccctaaattattttgtctcactatcgtctggaatatattcaattaaatccgatagtttaacatttaacttttcacagatcggtagcaatgtatctattcgtaaagatgacacattgtcgttacgccacaacttattgatagagttacgacttacccctgtcatcctaaccaactctgcaacattatctatattctttaccgccataatcacacggaagttatttactactttcattttttatactcctttttctcatgaaatatacatgcttttttcttataagggcacttttgtgcaaagaatagttgttttttaaccttttaaacacaactttagcactttataaaacatttttaaacctgtatggaataaaaaatcatattatgcactatttcatacttcatttaaattaaagttaatttatatacatataaggttatttattttatttatttaaactaatttaaaacctatttaaattaaaacgttcaaaatatgcattatttcatactttatttgttgaaaaattaacctgataaagttaatattaatcaaagtaatatagatttttaatgattggaggtcatttctttggcatatataatatcaaaaaaagtaaaaggaaacatttacttttatgtagcccaatacgttggaacacaaccatattactcaaagcaatacaaatataaatgcatttacgcaatcggcaatcaaaaaatagctttagaaagaatcgcaatgtggctattagataacaaccgtataccaaaagaactactagaaatcggagtatccataaacgatgtgaaatattggtatgaaaaagttgaaaaaacattacagaactactctttaactaaccataaaaacacctgaaaggagcattactatggcatttctaacaaattacaaagcaaacggaaaaagatacttttatgtagaaaaatatgttggtaaaaaaccatatacctgcaaacaaagtgaacgtatttattcgattggaaacgaaagaatcacattagaaaggctcactttatggattttagataacagtttcattccaaacgaattaatcttttcttgccataaaaaaatcccctccagataaaacagtattgagtccatcatatcagatggactctttttttactgtctacctataggggataataccaagcgttcagatgctttactctttttttacattagtttagacaagccttaataatagtttattaaaatgaaagtgtattcattcattatattcactgtgtataaagttataatgatatgaacatttgcatattttaatttattgatagaaatttcgtgaaaggtgggatattctagtcataggttaaccggacgacatcataggatcctaacaaaatgtttacaataattcaattataaaatggaggattttatatgaaaaagaaagtacttgctttagcggcagctattacattagttgctccattacaaagtgttgcatttgctcatgaaaatgatgggggacagagatttggagttattccgcgctggtctgctgaagataaacataaagaaggcgtgaattctcatttatggattgtaaaccgtgcaattgatattatgtctcgtaatacaacacttgtaaaacaagatcgagttgcactattaaatgaatggcgtacggagttagagaacggtatttatgctgctgactatgaaaatccttattatgataatagcacatttgcttcacatttctatgaccctgacaatgggaaaacttatattccgtatgcaaagcaggcaaaggaaactggagctaagtattttaaattagctggtgagtcttacaaaaataaagatatgaaacaagcattcttctatttaggattatctcttcattatctaggggatgtaaaccaaccgatgcatgcagcaaactttacaaacctttcgtatccacaagggttccattctaaatatgaaaactttgtagatacgataaaagataactataaagtaacggatggaaatggatattggaactggaaaggtacgaatccagaagattggattcatggagcggcagtagttgcgaaacaagattacgctggcattgtaaatgataatacgaaagattggttcgtgagagctgctgtatcacaagaatatgcagataaatggcgcgctgaagttacaccaatgacaggtaagcgtttaatggatgcacaacgtgttactgctggatatattcagctttggtttgatacgtacggaaatcgttaagtatttaaaaaaggtcaaatctcagaatagagtatttggcctttttatcactatacaatacatggaggtatgaaacgtgaaaggtaaattgctaaaaggtgtacttagcttaggtgttggtctaggagctttatatagtggaacgtcagctcaagcagaagcgtctacaaatcaaaccgatacattaaaagtgatgacgcataatgtatatatgctatcaacaaacttatatccgaactggggacaaactgagcgtgctgatttaatcggggcggcagattatataaagaatcaagacgtagttatattaaatgaagtgtttgataatagcgcatcagatcgtttattagggaatttgaagaaagaatatccaaatcaaacagcagtattaggtcgtagtagtggaagtgaatgggataaaacgttaggaaactattcatcttcaactcctgaagatggtggcgttgcgattgtgagcaaatggccaatcgctgaaaagattcaatatgtatttgcaaaaggatgcgggccagataatttatcgaataaaggatttgtatacacgaaaattaagaaaaatgatcgctttgttcatgtaattggtacgcatttgcaagcggaagatagtatgtgcggaaaaacttcacctgcatctgtacgtacagaccaattaaaagaaattcaagactttattaaaaataaaaatataccaaataatgagtatgtgttaattggtggtgatatgaacgtaaataaaataaatgcagagaacaagaatgactcagagtatgcatctatgtttaaaacattgaacgcttctgtaccatcttatactggacatacagcgacttgggacgcaacgacaaacagtattgcaaaatataatttccctgatagtcctgctgagtatttagactatattattgcaagtaaagaccatgcgaacccatcgtatatagagaataaggtgttacagccgcaatctccacaatggactgttacatcatggttccaaaaatatacgtataatgattactctgatcattgcgaattgcatgatatcaactctttaaagggcgtaggtcacgaattggtaacgaaaatgataaatcttgttccataaatgcaaccacttctgcttgttttgacggatataaatgactatatgtatttaacgtcgttgacacatccgaatgtcctaggcgctgggctaccacaagtggactgacacctctatttattaaataagatgcatgggaatgtcgaaattcatgaagtagaatttttggtattccagaagcaacaacatatttggcaaaacgtttatgaagggtagctgtcgctatacttgtgtaaaattcaccaaatacaatataatcattttttatcggtgctcctaatgtagcatgttcttttaatgttttcaataagtctatgacaagagacggtagcataataatacgatttgatgctttggttttgggttttgtaacttgtctgttatagttggttttattaatattaattgatttttcttcaaagttaatatcttcccatgttaatgctagcaattcgccagttcttgccccgctataataaagagtcgtaaaaaaggcttgatacagtaaatcatctactacatgaatgaattgtttaaactcatcaaactcccaaaagtttaatcgtttattcgattctttttcaaagttgccagcaatttttgctggattacttgtgagaccaaaaaactttattgcgaaattaaaaattgaggacagtacggtatgaatctttttcaaataaacagctgaatacttatgaataatttcgttttggtagatcatgatatgcttagcagttatgttgttaatttttgatttcccgaatttttttagtaaatgattttcaaggatggctttaattgtgttaattgaagactgttttcttctctggcaataccaatcaaaatagctatcagcaacttgagcaaaagttaaacttgaagttgtttctttttccactaacattttggcttccgcttcacgagcttctttttttgttttaaatccacgacgttttacttgtttttgagtgccatcaaactgacggactctgacaacgaagaaatatgttccgcgttctttatctttgtagaccaccatagaaaatcctcctgcatatataaagattgataattcgatttattgagtagattataacttgtttgttaccaaaagaaaagatgtcctaatcagaacatcttaagattgataaaaaaataaattggctggttaaacatatattagagtggctggttctaaatataaccatatatgttagaaagttacgaattcagagttttgaaaatgattgttggtttttcagttaaacaattgttgagaaagtttcctgaatgctgattcacatatgtatacgtgttataataattgtgtatatgtttcacgataaactcagtaataccaagggtttatcaaactgaaaaataataattgaacataaataaagacccatagaagcgtgtgtaagaggtgcgagctgaaaattcctcttacaccgtttacctaaccatcgcttaggaaacaactgccccgtatgagtcaatcttagtatatcatgtttccaaaatattaccattgagaaagttaggatggaggatttatgtttggagaagggggagtttttatgtgttttcgtaaaaaaatatgtgatttaatcgaagacagggacgatctaaactttacagatgtcgcaaataaaatgggtgtttcaaaacaatatttacaaaagtttaaaaatcaaggtaacatcagttttcctaatttactgagattggcttcagttgtaagtacaaaaagtgaagagctttcaatgtttttacatgagtggtgcgtagaattagatagtacagaagccattaagcatagttttgaatatgcagcattggttcgtgataaggttttattgaataaattactagaaaaacacaaaaatgaatctggtacagttgcagagtatgtaaatgtttatggagtattatataagtatatgaatgatgaaatttcaggtactgaaattattaagtgcttaaagatgtataaccgtccttctgataacatgttaaatattttgattgatattatgaaatgttacgattattatcatcaaaagaaattcaatgcaatgtttgatttggttgacgaaattgagaaagagttaatctcaattgatgagagtgatcgtaaaatgtttcttaaggaatgttatatgtatcgacttgcagaagtgttttccccgcttaatctacaaagaaaaaatttagagtcttcaagatattatgccaagttattaatagaagcaaatctatgtacaaaaactgtttcagatgctttatatttattggggatgtcatatttaattgatgatgaggaactttgtttagagtatttacaggaaagttataatttatccaaaaaagtaaatgacgcttcaattgaagcagcagcgcgttataatttagatgttgtcaaaatgtatttaaaccttagtttgccattagattcagatgtacgtttaatcaattttcaaaataatcccacagatgaagattcacgagatggattaaaagaaattttaaagtcaaatggagaaagagattttttaagactttttctagcaatcactgatacagagcctaacagaatatacgaatgttttaaagaatttcttgttcaatcgaactacctctttgtaagtttagtagctaaagaaataaatagaagaggggataattccttgctagtacagcaaatgattgattataatatggataaaggagtggatgaaaatgaaaaaatttactttagtactttgcgccttttcaatgttagctgtgagtagtgtttcgtataatattataaaaaaaggttcatttcaatctgtagaaattaaaccaggtggctaaaaagcgcagcatatgctgtgcttttttatttggggcagctctattaatgagactgagttttatcggtaaactaaaaaaagaaataaagaatttgtttactcttctatttttcctttcaatatatgataaaattttcgacaaatagagcctaaactgttggaaaagagtaaataaaaatgggattaaacggacttatagggggaatagaaatgacgaaagaagagatcgtagaattatttttgaacacagtagatgaagctaaaccggaattaattgaagaatatatagaagaaagttttagaatttaaaagatagcccgtctccaatatgaggggctattttttttcgttattatgatattcttctaatgttttggttatcgccaacatctgttgaagtacaatttcctgtttttcctcagggagcgtatctaatcgttccataatttccttaaattttgtgtgtttctttatatctaattcgttaccacgtcctagtaggaaatcagttgttacttctaatgtatcagataattttgcaatggtatctggtgaaggaaagcgttcttcggattcataataaccaattacacgagacgaagctcctacctttttccctagtatttcttgcgtccagttacgttgttttctaagtttttttattctagcccctatgcccatcaatttaatcacctcataaagttattcatttgaacaacttgttctctttgaggttaatcatagcacattatgttcgaaaagtcattgacaatgtataaattgttcgatatgattgtaatcgaacaaaacgttcttacaggaggtagacatgaaacaatcaattatttatcataaaatcgcagaacattgtggagttactgaaaggtatataagaatgctagataaaaaagagcgtagcccatccatggaagttgctaaaaaaatagctgactttttagatgaatcaatagaggagattttttttaaccccaatacgaacgaaacgttcgtttttgaacggttttacccaaagttaattgaaggaaacgcttcaattaggcgttgatgtaaatataacctatatagggagtggtatccatgcacaaaaacttatttattgctcgaaaagagcaacgcatgacgcaagaagcaactgcaaatttaatcaatatagccccaaaaacatattatttaaaagagcacggtaaaagtgatttcactctaaaagaagctcagaaactagcaaaatacttcaaaacaacagtggatgagttgtttgcaaaataaagagaaaaggggagagaaatacgcatgaaaaacggtaaaaggccaactaaacgagagaagatacatatcaattcatataatttaaatcctgataattggctaatctttaagaagatagatggcgaattacatttagtgcatcgtcatacaaactcaatacgagtcattccaagtgcatagggtggtggactggacaagcattattaaaatttaggagggctttacatggatggattaacagtagcaaacgaactggtatttgaaagtaatggtgaggtagtaacagatagtttgacaattgctgagatgtttggaaaggagcacaaaaatataaaacgagatatcttagaaacaatttcgaaattagcaagtctacaacataatgctgaagtggatgaactaggtattaattttaatacgctcaaatttgagcccattgaatatcgagataaccgcaatcgaatacaagaaaaatacattttaaacttcgatgcgtttatgctcgtaactatgagttatacaacgcaaaaagcaatgttactaaaggtaaaatacatcaatgagtttaaccgtatgaaaaactatattcagagccaacaacatgtacctacagatcccatgagtattttaaagcttacttttgaagcgctagaagggcaaaagcaagaactccagcacatcaaatcagatgtcaaattgtcccctgtgcaatacagagttcaatccttagtagctgcttaatatatttgtctaattttttgggttcagttcaataatggtggtcttgtttatattggtgagattgtactaggatgatagaatagatttaactgtatgacgtagggtcggtgctgtcctttctcttttttatgtagagggaaagtaggtgactcctatgatggaatatttactgtctttgctacagaatttattgaaagtatttctaggaattattgttattggttatggaaacaagctagtgagtaatattagcaaaacgcaaaagaacctccctacgccgtcggaagcaaaagggaagttctagaaaaagaaaataaatttatttagtaactacccgccttacggcaatagttaccagaagagatggatccaggcatctcttcttttattatatacccaaggtattactgcaatactactgtagtaataattatatctaatgaacataaaaaatcattgtgtaaacaatgggtgtaatggacaaaagaaaagacaccctaaggtgccttcttccgacttgagcaatcctatagtaatgcgatgtcgattaataaaataatttatataaataattcgctatatctttatgtaccctagctgatataatttataaggaaattattggctaattaataacgcacacatatattagggaggtacataagtcatggaattaataatttcttcatttgtattagtagtaatattctttattctttcgatagttttaagtggtaaaggtcagcgaatagcaaaagaagttttaaaagagcttattaatggtcctgaggggaaaatgttggtaggtttttttggatctgcagcagttacaggagtaatttttgtcatttggcttctattaaattaagcattccagttactcagtctgatacaaggtgtaagaaaattactggataattaaaggtacataagccatgttagaggtaattacggcatttttcttactaatcctccattccattgtttatctcttttcaagtggagaaactaagcaaatagcaaaaaaacatataaaagaaattcttaatagtccggatggagtaataatattaattgttgctgcggcacttttaatcggggggatatatttattatcactatgatttcaaataccttagcttaaaacgtataaggaaattaaaagtatacaaatagcacaattataaataatgatatttataattgtgctatttttcatatttatcatatctattattctttcattattttcaaaaggtgaaactcaacaagaagcaaaagaagttgtaaacgacattgttactggttctaatgggaagatactattaatcgttgctgtggtatttgtaattagagggatatttattgttggtagtattgtaaatgatggctatgaatcacctaaaaatccaagtatgcgaaacgatcgtacacctttaaattgtgctcattatggtggagaatgggacaccggtggtctttttggagaagctaaatgtgtttataataaaacttatgaatcggataataaataatatataaaggccttatcttttctataggaagatgaggattttttatgcataaaaaagacacctaaggtgcctttttctaatgtgtttacatccttaattgattgtaaattgatttgaatacgtgaattcaccacgatatttaattacagcgacataattaccacttgtatagctatctgtgataggtgtttgccaaatttctgttccaggaataaattctggttctattgtttggaatcgttctagggtaccatttgtgtggattttataaatttccatttgcgcaccaaaatgttccctaccaaagtgctgtgttaagtaaaatgtatcaccagttattaaattcccaatcttccaatcaggttggtatgtactttcctctgaattttgtaaatccataatggttttgaatccccaatcatcattaagtggatctgagtaagctgcagctgcttgtgaggtaggcttactcatttctactgcagtaaacccactaaatgttaacgctccaattaatgctatttttcctaatttcattgttgtttccccctgccaaatttcagaattatttaaaatcatatacaaacaataatataattcgttgtattatatttcaaatattttctaaaaaaatccagaataaaaagacaccctaaggtgccttcctcttacttatgaatcaaatttatattttgttcactttattcagtatggtgatgatggtctttgtatagcaatagaaccaaatcacgctataagcattagcggacatcaaaacattcaaaatcggtcttttatgtccgctaatacttaacgtaagttttggttccgttgctacacagacgactatatcctctctactgactgtggttgcattttcaaacaacaaaattataaaatctatttatataatcttaatgatctaaattcctcgtattccctcattctcttgcaaaatgtcgctttcttcatgccagccttatccatgtactcaacagcgttgatctttcctaccttccattccttactatcctcttgcatgtaccaaacattagaattgaaacctttgagattactgttcccttaactacaaagaaaacgctaaacttcatatatacttctgagtatgttatgtaatactaattggtttttatgataattattcgtaagtggataattcactacgcgcctcttctattgtatccctagcaattcttaacgattttaaacatttgtctaatttcgctaaatctgtttggctcgcagcatctccatagttgtctataacaaattgcaagttatccatcgcctttaaaatagatgaatgtagaccctttaattctgttgggggttctacatatcgtacacttgagatgagataagacattttatagaaaacatcgcctacttctgaaacccacgatttgtttatagtccccttaatttctgcatcagcctctaaaattctaaatcgggtcgccacatcagataggtcctttaaataatcatccattacccatgcataatgctgcttgtctaaatgtttataatcacttgtttcggctccttgctttacttctttttgatttcctatattttttttatccgcagtgaattcctcaactgctgctgtaatggtttttataccttttttgctaccaacaagagcgtcgatagttaaaatactacagataaaaatcacaaacatggcaatccacttagcccatttcagcataaaaaaactccttacttaatatatttctcctaaattataatacaggattaacgttcattataaacaacatgtctctttacctaataccttaccttctgtttttccaaaatcgacatctttaagtaaatctatatcatgtcaaaaacgatgtttaaatattgtatcattaaattaaaatataacactataatattttcctatcaagaatatttttccaaaccaaaatcattcatagactcttcttttcaccattaaacctaatttatacatattgaactacccccactttcacttcgtttagaagtgagggattcctaagtaaagagttctatcgaactctaattgattaggctaaccccgcagtccttgcggttagaagccttatcgcttcattctttagattgatacttgcgttaatatctctatcatgatgtgtttgacaagaaggacagtcccattcacgtaggttgagatttttaacgtctttattttgatacccacaacaagaacataattggctggaagcaaatgttttcgatgcgacaatgacttgtttgccataccattttgctttgtattctaacatggatcgaaattgcgaccaagatacctcactaattgcttttgctaacttatgattctttaacatattcgatacttgcaaatcctctataccgataacatcgtggtttttgatgatttcagttgaaattttgtccaagtaatcttttctagcattggatatgtattcatgaattctagctacctttactcgttgtttattccagcgagaagatcctttcattcttctagaaagaacacgctgtgctttcgccaacttatcttctaatgatcggaaaaacttcggattttcatagtgtgttccatctgacaaaatagcgaaatcttttagtcctacatctattccaatgtaagaatgtgttttcggaagttcttgtacttctgtttcaactattagtgacacaaaatatctaccagaagggttccgtctaaccgtagcatttacaatacgcccctctacttcgcgacttttggcaaatcgaacaaggcctagtttcggcaactttattttgttccctacaacggcaatgttttcatttgtttgttttgtggtataagattgtacgttgttcttcttagatttaaagcgcggtgcgctgttttgttttttgaaaaagcgtgtataagcatccgcaaggttgcgaacagacgactgaatcgcaatactatccacttcttttagccaaacaagctctttcttcatggcaggtagtttggcagagcatgtaccataggtcaagccttttcctgtctctttgtatgcttgatcccataaggataggaaatgattgaatacaaagcgagaacacccaatcgttttgttgattagaattgcttgtgcctaatttggatagatacgaaacttataggctttatttatcattatttaattcacctccatttcggtatatgactattatacaccgaacgtacattcgatatatagtggagtaacactttctatatgtcgaacaattaagatggcttcctgccatcccttgttcgaagtcaattcatctcccacctactcactgggctgtgccccttcacgctcctttttatctattagtaaaaaatagtcacctatatggttgatattggtgatactgttgatatgattgaaaatgttgtgtcggtatactataaggatgagcatatggatctgctagtggccaaggctttggtttaggaatataccaccatggtatttcaggtgtccaaggtttaggtatagtggttaacataggactctgtctataaaaatatccattcaagttcgttcctcctaacataaatttgatatttatttgatgtattatatctaattgggaacatttatgaatcaaatataattggactatcaaaattaacttttttttcagaattttattgaaaaataaatataatacaattaaacgaactggatactttgctataatggtaatatataacattagtagacttttataggatgggggaatatataatgatggtttcagctaaggggaataatgaaattacaaagctattaagcgattggtatgttgaaatccgctcaaggcgtataggtaatgcacatcaattaaaagaaataattgattctaagatgcataatattgaagaggatcaagatttattactctactactcactactagattttagataccaatttgtaattgataatttaagcgtttcaaaaagcagttttgacaaagttgaggcttttgatatgcctacagataatttcctagcttattattatcactttttcaaagggattcatgcctctactattggcgaatatcaaatcgcaaaggagagttatgaaaaagcagaaaaacttttagactgcattcctgatgaattggaaaaagcggaattttattataaagttggagctttccattatgacatatatcaagggctattatcttataaaaaagtatcagaggcaagagaaatctttgctcaacatgctgggtatgagatcaatgtagcattctgtgataatcttataggcttagcttgtactcatttgagagaatgggagctcgctgaagaatatttcacgaaagcaatggatatgttccaaaaaatagacgaagaacaatttattttaatggtgcgtcaaaatttagggttaatgtatgctactcaaaatctttcgccattagccattagatatctttcagaagtaaatcaaaaaatgcctaacaattataaggctctttttattgaggcaagggaacacatgaaggaaggaaatcactccgtcgccaaagatctcatagcaaagggatattccgtttgtcaagagattgaaaatatagagtatctacaccattttaaaatattagatgcaatgaatggaggttttcctgccgaagcacttgaaatgacagtgttaaaaggcgtatcatattttaaagagcaagaacttttcgaattcattaaggaatacgaagaatatcttgctactgcattttataaagagaataaccatattaaagcaagtcattatttctattcatgttctcaagcaggaaaaaaagttattgagaaggaggcattaaaatgaaaaaggcaattctcggtttagttggtgtaattactatttttactttaatgtttggtgcccaatcccctacagaaacacataaagctattgatgttattcaatatgctcacggaaatcatggtggttaagatcttaatttagcgaggataaaatcgcacaatacactcatagccatactgacggatattaaatgaataaaggtcttcacttcattgtgagggcttttttttataagaaccccacttataacatctttaaaatctactatatgtgaactacccgccacttaacgccctaacggactgtttgaagtgggggcttctcggttagtcgttacttttggtagctaacgaattcgtcctaagacagcacacgagaagactccttggaagaataaagtattgttgtccttattcccccttttcggggggatgggcaaaaacacccaaaatcaaggtgaaaagtgaggtaaaatgatatgataaagcatataaattccgtttgtatccaacagaagaacaagcatatcttatgcgtaaaaccttcggttgtgtacgttttgtgtataatagaatgttagctgaacgaaaagaagcgtacgaaaaatacaaagatgataaggaacaactaaagaaacaaaagcctccaactcccgcgaaatataaagcagaatttgagtggttaaaagaagtggattcattagctttggcaaatactcaacttgcaaactgcctataaaatttctttagtagtcataatgattttccaacattcaaaagtaaaaaagacagaaagtcttatacaacgaatgtagtaaacggaaatattatgttgcttcatagtcatatcaaattgccaaaactgaaaatggtacatatcaaacaacatagagagataccacaagactatagggtcaagtcatgtacgatttctatgacacccactgggaaatattatgtatccatcttgactgaatatgaaaaagaaattgtacaaaaagaagtagaaacagttgttggattagactttgcgatggatggattatacgttagttctgaggatgagaaagccaattaccctaagttctatcgtaacatgttagaccaattaacaacggcacaacgagtattatcaaggcgcaatgataatgaacttgtattagatacgattgaaatgttggcacaaaaaaagatatgtgtggaaccattctccattcagatcagggattccagtacacatctcatgcctacaacaaacgactttccgatttaggtatcattggtagccacactcgcaaaggaaactgctataataacgcttgcatcgagtcatttttctcccattttaaatcggagatgttgtatttgaatcattttaaaacagaagaagatttaatacaagcaattaaagagtatatttacttttataactataaacggttccaaaaacgactcaaccatcgagctctgatagaatatcgaatctcgatggctgtttattctttttcataccgtttacttgacaggggtaagatcaacactagtcttttttattaataaatatcatcatatttgatatttattaattctcttttccttttttcttaataataaattttgaaattaatttcgataaagcttctattttttattatattttgttagattgattcaatatttccacatttaatgctgtttgtgattgaattgactttacagtttgagttgtttttttatccataaattattctatattacagttaaatttggcttttctttacgaaaaagactcattaatccactaattaataataaagtacctggtaataaattaaaaaatgagatacaaataaaaccaccaatagcggatataatcattaaaatcccaccaattttagctttaaatgtaacaattaaacaaccaataattccaataacagataatgtaatagggagccaatttaagcctattattacatttataccttctactttaagagtcttacttagattatcaataaacatagcataaatggaaaataagatacccataattccaccggtaagccctaatatgtattctgttgttcttctcaagattaacactccttaaaatacataattatttgaaattattctattaaaaataaaatacaaatcatttacttttatagctatattaatttatattttatgaacaaaaagcactctttcgagtgctttttctaatattgcataaaaaatcatgctttttcactcttaaaatatattgtagataaagtatactaactatctcaattgaaattatataaaggtataaaaatgtaattttatttaaacaaatctattttaaacgacaaagaaattttataagagttagtgttagctagcctctttctaaaattttatcagggtatttatttagagaaatattgaatacttctttaaggatctgttgatattctttttcatttatagttcgtttacttttttgacattttcgtgtttctgtaaaactttttttagtaagtgaaatatgtccatcttcaattaatttacagataatgtatcctttattaaaaggtgattcggggtgctctacaataatattttgtatagcatttactttgtttgtatctatttcatctaatgaaaacgcaaacccagtgcaccatgcattagtaggttcagaattaaggaattgggcactctccccattatctccttttttcatttctaataggtgagttcctttctccgtattttgtttacgaatacgatattttcctgtttgagatgaaattacttcaccgctaaatggaactgggcgtaatggaagatgtgaggcaagtcccccatctataatatatttctgattattataatttaaaataataatcacatgtccatcgtcaggtttccacttatcaccacctaaatcgtaaactgtaccagatatgcgataaacatcaaatccacaatcatgtaaaaaataatataatagtgtattaagctcgtaacatagccctccgcgctgatttaatagtaatttttcttgaacgttcattctagtaattcttcggatatttttgtccatcacgtctaaattttcataaggtattacatatgccatttgctgaagaatttcatgtaaattttcaaatcttacctcttctttcggaggtatctgtaaccgtgagaaaaaatttttttgtaattcagtcaacattatataccaccttccatttatagaaaatttaaccatataatttaatgatacactaaataaaaatataatcaagtgtaataaaatcaaatcaagttattttatggcttgtttttatataagaagtctcacaatattaaaaaagtaaattgtaagcttagacataattcgggcaaactttcatcttctattgatgttcttcttattcacagggcaattaacttttgttggctacttttttattttctggataaatatacttatttatcccttttcttatatagtatttctaataatcatttatgaaaaaggcgaaaacaatactattggttttatctacccttgttgttcaatacagcaatggtatccttaatagtgtcttatactacttaaatatgaagttgaaaaattcaattttataagaaaagagaaccatataggctctctttccttggcataattacaacatagggaatgttgagacaactttttcaaaactttattaggggaaagttttaaaaaatgtactcacaattatttttacataaatggaatataaagtaaattgatataaaattttctaatgattggtaattttctgttagttattacaacccttgtgctacaagaaggtactaacgtattgctattaagtttaaaaaataccccaaaacaaaaaaaacggtcttccttctatctaaatggagatgaaatacagaccatgtcctattttttaggggtaaaatgaggaataaatttgtacataacaagtacgttaatgatagtaagagctttctcatttacagtacctgtagcatgtggagataatggtgacccaaaagaatatactgaaggggtagcaccacacatccatcaacttaagaaaagtaatcacctccaaaacgaaaaaaagagctgacttctcaaagttactaactgtagagaaagaaaattttcattttggggtgcagttcaatgtatggtgacccctataaggtataagtatttttttatttaatatttagtgctgtatccattttatttcaaggatagttcatggaaatattcccttgttaagattcctctataaaaatagtgaaaaatataaaattagactaatgttgaacatctttttttgtgttctattattttttcatcttaggttctctgtacctaagaatcatatatagaaattattatctactaatagtttttcatatacataaaattattcctttaattagtttcgagaaattatgtatatctaccatcactcccaatcaatatgtaattattttgtataaatatcaaaaaaattaacgaataatgactttaattctcgtgaatattccttattatttaagttaaattttggagctatcgattacttcagtcttcaatcattatatataaattatccctatgttataaaaacatataaggtcagacgtctattgaaaaacatttaataacattccgaaatttacaaaaaaggagtacgtttgtaatgtaaataaattttaaggagtgttaaaatgaaaaaacaaagcttagctacagctatcaccctatctttaggtttatctgtattcggtggtgttacgtctacatttgctatgacggaaaagagtaatagcattacaaatcaacctattcaaatggaaaaagggaaaatacaccaatttaatatgatcaatgctacacaacctatagatttcgggtatgatacgaagaaaaataaagatgcagccaaagaatggggagcgaaacattataagaagtggatagatgatttgctaaaagatgatacagatgacaaagaaagtaaagaaagtaaactagaaagaaaaaatgaaagagaagcaataaaaagatatacaggtaatgattatacgaagattaatacacaccttagaaatgatcgaaaacctgcaaataaagagtttgataaagaaattcagtacatagatcgagcgcttgcaaaagtaacaactcccgaagcagtaaatgtttatagacgagtctcagaagatgcatttcttgaaaaaggtaaaaaaggtgaaaaaatttaaagaagcgtttaatcatacagaacaatcggaaaaagcatatatgagcacctcattagttaaccagacaacaggaaattttcctaaactgccgattcttattcacttaacaattccaaagggaaaacatgcagcatacttaggaaatctagcgaaattacctgaaagtgaattgttaatagctcatggatcttcttataagatcaattcaattgaacagcaagtagatagtaaagaaagagaatatttactaatagaagcaacattaaactaactaaatttttgaaaacccttaaattagcgggtgtctcttttaacttaaagtttatcaatattattatatctacttaagttgaatggatttaatactttgtgcagactcaaaataaggttaaaagagatttagtagggagaacgtcacatcgccatcaagttaagtaatttattaacccacaaaatagaaaaatgagcttaaacctcaaatatatctgcaaagatataaaattttcgttttggggttgatttgttttcttaagttgatggcgatgaggtagcatcacgttactattaagccgacaatataaaatttctctaaaatgaaaaaatacgctattctttctgtagaatcataggaaaggatggcgtttttatgtctgtttctgtgtctgacgaattacaactatttgcccaagagattcaaagttttttatctccaaataccttacgagatcttgctagagatgttggttttgtacaacgaaccagtaagtatcaagcaaaagatttagtagctttatgtgtatgggtgaaccaaaatgtagctatgacttctttaactcagttatctagctgtttagaagcatcaacagaagtacttatcagtcctgagggactgaatcaacgatttaataaggctgctgtccaacttttacaacacctactagccgaactactaagcaaaaaattggccgcatctatgccgatttcttctccatacacttctgttttcaagcgtattcgtattttagattcaactgcatttcaactcccggatgtattttcatctgtttatccaggtgcaggagggtgcagccatactgctgggataaaaattcaacttgagtatgatttgttaagtggacagttcctacatattcatacaggtccaggtaaacaacatgatcgcacttacggctctctgtgtgccccaactgtgacagcaaatgatttatgtatccgagatttaggttattttcatttaaaagaccttcaatatatacaagataaagaggcctactatatctctcgtatcaagttgaatacacgtatttatcaaaaaaatcctaaccctgattatttccaagacggaagaattaagaaaggtacagagtatatacagatagatatggagacgttaatgaactcccttcaaccaggacaaacatgtgaaatagctgatgcttatgtaggaatgattgataaagtgccagctcgtgtaattgttcatcgattaacaaaacaacagcaacaaaaacgattacaagatcaagctgtaagagaaaaaaagaaaggaatgaagtattctcctcgtagtaaacgactcagtggtatcaatgtatatatgacaaacacccctacagatattgtcccgatgggacaggtacatgactggtattctttgcgttggcaaatcggcgtgtccagataaggacacattatctagttggtgaaagtccaatcgggagaatagactccactcccgtagcctgactaagcctggcttttagaaaaaagaaataatctctactatacttgatattgtataatcttagcttgatagtgatgtgttagtaccccatactgtacatttttttaaaattcagcactattatgtacagagaagattcatcataagttataccacctcacatgtttttcttcattgtaaggagaaatgtttgaatggtaaaaagcacaaaatgatatatccgtaagtagaaagtattattttggaccttacaaaacaaaaaaagaaaccatacatagttcaaacatgtatagtttcaaaatttattacacttcagtacaagatatgtaatatcctccgcgagccatctttatttcagcacggtacattacattttctaagtagaaagtaatcggtttaactttactctcaaattttagtctttcattgcattcagttgcatatccttcaatcgctgaagtaataacttttgatgatggatacgttaaagcttcatctagttctatgaaaaaacttttagaaaataattttttcataatccccttcttctctttcatcatattccatctccttcacttcaagttgctatcatccatattataccatacattcaatatatctttgaaaataaaaaaatcctgcatttttcatgcaggatttttttattagtcatttttcgtaaagtaagaaacgaaacgaagaatttctaagtataaccatactaatgtaagcattagtcccatcgcagtataccactccatatatttcggagcttgactacgtacaccattttcgattaaatcgaaatctagtaataagtttaatgcagcaactacaataacaactgcactaataataataccgattgtaccaccttggtgaatgtatggaacagttacaccaaacatatttagtaggaatacgactaaatacataaccataattccaagtgttgctgccataacgcctgtacggaatttatccgttacttttactacgcgtgttgcatataacactaacattgcaaatagaattgagattgttagtaatacagcatttaaaacgatagaatcgccaaatttcattgtataaactgctgaaatacttcctaacacaaccccttctaccgctgcatagattggtgcaccaaaaggtgaaatgcgcgggaagaacatagacgcgaatgcgatgattgccgcaacgattaaagcaccaattaatactggcatcttcatcgtcccctgcatcatctgtatgtatgaatagacagacgttgcaagtagcaagataagcataatgaacgttttgcctactgttccgccaatcgtcatcgcagaagcgcttgctccctctttacggaatgcctcttttttcaacattggattagatgttctcattttttccctcctaaaataggttctaccaatagtgtaaagtttttctctttacttttcaatatatgcagcttgtttttattttaatccttcaacgatgtctgatagttcactccatctttccatctgtttttctagctcttcttctgttttctgctgtgcttcagataattcttgtgcctttgtgaagtcagatccaactttcgcaagttcttctccaattgactcaattttttcttcaagttcggcaattgtatcttcaatcgtttcccattcacgctgctcattatatgaaagtttacgtttacgttgttgttttggagcttcttctactacttttttctctttttgaacttccgctttctccataagttctctcgttttttccatttctaaataatctgtataactacctaggaattcacgcacttcgcctccgccagtaaagatgaacagttcatctactactttatctaagaagtaacggtcatgcgatacagttaaaacgacacctgggaaatcttctaaataatcttctagtactgttaatgtttgtgtatctagatcattcgtaggttcatcaagtaaaagtacgtttggttctcccattaaaatacgtaataaatataaacgtcttctttcaccaccagatagtttaccaagcggtgtaccatgtgaatgcgtcgggaataagaaacgttctaacatttgagatgcaccaattacttttccatctgtcgtatgaataacttctgcaatctctttaatgtattcaatcatacgctgatttaaattcatctcttcattttcttgcgtataataagcaacttttacagtttgcccaacttcaatttcaccaatatcaggagataacttacctgcaagcatatttaatagcgaagatttcccgcttccattcgctccaataattccgatgcgatcgcctggtttcacaatatgattaaagttgtttaataccgttttatcaccaaattttttcgttacatcttttaactcaagtacttttttcccaagacggctaccgctaagtgcaatatcaactgactgttttgcagctggtccttctagttcctttagctcatcaaaacgctgaatacgcgccttttgtttcgtagaacgggcttttgcaccacgacgaatccaagcaagttcacgacgatataaattttggcgtttcgattcttgtgccaattcttgctcttcacgaagtgctttcgcttctaaaaatgtactatagtttccttcgtagctatataatttaccattatctaattcaaaaatacggttcgtcacacgatctaagaaataacgatcatgggttacaagtaataccgcacctgtatatcttgctaaatattcttctaaccattcaactgtctcatggtcaagatggttcgtaggctcgtctaaaattaataaatcaggtgtttcaataaaacattgtgccattgcgatacgttttttctgtccaccagataaattcccaacaattgcagtgaaatctgtaattcctaatttcgttaaaagagatttcgcacttgcatttgcttcccatgcactcattgcatccatacgttgctgcactgcaaataattgttcctgtactttttcattacttggatctttttcaatatttaatagtgctttttcataatcacgaagaagacgaattaaaggtgtatcaccatggaacacttgctctaatactgttagtttttcatcaaactctggttgctgtgataaataactaattgtatacccacgtgaatacgtcatatcacctgtatcaggagtttctaatcctgcaattatttttaataatgtcgatttaccagttccgtttacaccgataattccgacacgttgtccttctgtaatactacatgataatccatcaaataacggcttttctccatatgattttgataagttctccacagttaacattttcatatttgtgcattccactctttcataaattgttcaataaactgttccatataacgatgacgaatttcagcctcttgttttgctgcattcgtattcattaaatcttttaatttcaaaagtttttcataaaaatgatttaaagatggatcattattttttctatactcttctttcgtcatttcttcacgcggcggaatagttgggtcatacattaatctccctttcgccccgccatatgcaaaggtacgagctattccaattgctccaagggcgtctaagcgatccgcatcttgaacaagcttcccttcaagtgaatccactttaccgccatggccacctttataagacatattggcgatgatatgaagaatatgtttactttccttttcttcaacacgtagctcttctaaccaatcagaaacttttttcattcctgcttcttcactttcatttagcttttcatctgccacatcgtgaagtaatgctgccatttcaattataaaacgatttccaccttcttgctcagataaagaaatcgccattttatgtacacgttcaatatgataccaatcatgcccactcgcatctttttctaaaatatgttttacaaaagtaattgttttttgaattttttcttgttttgtcattttatcttcacccagttacttattgtaacacgcccgcattttttcatcacatattttcttgtccgcccatacactaggtggtaggcatcatcatgaaggaggaataaacatgttctataataatcaaccgccttatccaaggcaaccattgtatcctcaacaacaagaacagagatacacagaacaatacgaagaacaagagttacaacagcaagaaccacaatatgacgaaaacccatatgcaacaacgcaaaatcaagaaactgaatttcaacaaaatccatatgaaacacgtccaaattatgaatatcctcaaaatccatatgtaataccacaaaaccaagaacaacaatatcaacaaaatccatatgcagcaccacaaaatcaagaacaacaatatcaacaaaatccatatgtagcaccacaaaaccaagaacaacaatatcaacaaaatccatatgtagcaccacaaaaccaagaacaacaatatcaacaaaatccatacacaactcaaccacaacaaccgcaataccaacaacaaatgtatcaaccaaactacgacgtacgtgtctcaccacctaaaccaccaacaatagatccaactcaaccacaaatcttaccacctggaccaattactgaaccaacacaacaacaaattcaacaagttgtcggtacacagtttttacctttcaagaaacccgtactagatttcgtaaaaccatgggtagattacggtttaaatgaagcaaaacatacatcacatgaacacgcattaacagaagttgctgcgattatgtttttagttggtaaaggcttcaatccgacgatcgcacattatatcgttgaatcttgggagaagaatgaacagttttagaattgtttatttgataaaatataaaaaacacaaaagtgccaaaccccttataccacaagggttttggcactttttaatatctaaaacaaattttattgaaataattatttttatagattttcatacttttttatatagtacgtgaacatatacagtacaaaattacacctttgtatacacatttttagaaacatcttacgtttatcaaacaataaccaaaagacgtacctgcaacctcatcatataaataatagatattaaaaagaggacactataagcgccctcttccttaggttttaaatatgttctccatgatccataaacacttcaattgcttcgttttgtggtatgtcttttacattagtaagaccaaaagtaaaaacagcggataacatcatcattaataagattgcttttttcattttagcgcccttctttctatgctctttttgtctgcatctaaagcgatgtgcaaatacttgcttgcttttctgtgattttctgaaccatagaatctttcacctaaaagagaagcatattcttttacccaatcatataattcttctttttcaaaatacgaaataccttctataaccacattttctaattcttcttgcggtacatagttatgtactgcttttaaaattcggaaatgatgacgataacataagtcgctaatcttatagccattctcaatatattcattagcgatatgactataacctaacttaaaatgctctcttgctaaaagaaacatagttttagcgttattttctaatgaatcctctaagtgtttaattgctaactctggcatgttttgacttgcgtataaaagtcctaaattatgcttaactcgtttaataagaagttcatcattagatttttggaaggtacctagtgctgaaagtaaatattcctctgcactttcgaattcatttagtcgaatgtgtgccattcctaaagtatttaagcatgctgcagtttttaattcataccctggactaattgaaaatacttcattcgcctttgtagcaaattgaactgctaggatcggttttaatacgtgatagtaatggactgcaagccaataattaaattctgctttttcaatttcatcatgcatgtattctaaaaacgtttcagctttttcaaattgcattcttgcttcactatggtttgctttattaatagcgtaaattgctttaaataaatgatgatagtactctaaaaatgtttctgtagactctgataaaggctcgattttgtccagaatatcttttgtactatccatatcccgaattagcagtttatatcgtgcattcaataaagcgtagtagactaatattgtttggtcttccttaatattattgattttatttgcaatatcttcttttattttctgagactgtaatacacgttgtgaaatcatagcttgataccattcgtttaataattttgtgatttcttctttagaaataatgtcaacactcatctacttctacccccttttgttaaatgttatcatgacatgcttgtttgcataaataagtttttgaatattctaacttgaaaaaattatttttgaatattcatgttaacaaaatggtcccttttcaaaccttaaaaaagaacacatgtttgtttgtagtggagttaaaaaaacaaaagtgaggtattacatcatgggatataacagctttcctgtagtacgtggaagaggtatggtgttaacaatagtataatatatgagtagagataacgtatacaacgataggtagttctctttttttgtctctttgtagaattaacaatagtataatatatgagtagagataacgtatacaacgataggtagttctctttttttgtctctttgtagaagctataataatagtataaaagagatagtatttatagtatagatagattgaacagttggaggtggaaaaatgtttaaagtacaaagtattattacatcgtttggggaagaacgttggatggttttacataacaagggtgaaccagttatcccaatcatgaaatttataaaacataaggattctttaggaaaagcacctaatacacttaaaacatactgttatcatttgaaaatattctggtgttttctaaacgaaaagaataaagattacagagaagtggatataagtttattaacagaatttattcattggttaagaaaatcaacagatgatataaatactatctatttaaatgacacaaagaagttagtgtacgctaaaagaactgaatcttccgttaacttaatcactaattgtgttatcgaatttttggactaccaatggcgtagtggtcaaatcttatttaatgtaaaatccaaagttacaaaagaagtccataatacaaggcggaagtatcgtaaatttttagatcatataacacataccccaacaaccaaaattaatattttaaaacttaaggaacctaaaagaaaaataaaaaccattactactaagcaggcggaattgattcatatagcatgtaataacataagagatgagttaataattcgtattttatatgaaggaggattaagagcttctgagttattaagtttatggatagaggacttcaatatcaatgatggtagtatcactgttagagaatctaaaacacaagctggagaaaaaagaaaagtatatgtatcaaatgaaacaatgaatttattccaagattatattatcgattaccatactaatgatgtagattctaaccatgtgtttattaatttaaaagggaaaaataaagggcagccaatgcaatattgggctttgcaagctgttatacgtatattgtctaaaaaaacgaaaataaactttaccgctcatacacttagacatacatgtgcaacacaactttatgatctaggcatggacgctggtatcattcaaaaattattaggacatgcccaggtacaaactactttaaatatgtatattcatccttcagaagaaactataagaaagcactgggatgaagcccagcagcataggagaatgagaaaatgaatatcgtagctattaattctaataaaatacaacgtaaagttatgaacgaccttaaagggtattgggctttagatgaatggaaaatcgaagagtttcccctgccagatagaagaggaaaaattaaagaaacaaaaaaaattgttgatttcaataaaattagtaatgaatatattaaactggagataaagtactattctttttattctttaaccaatgaaatttggcttttatccagctttatggagaagcatttttataaaatgtactttctttcaaaatttttagccgagaaattccctcaagtcacatcaataattgatattccttacactacattattagatgaatacaaattatatctaactgaaaataataagccgttaaaatacccccatcatcgtggaggagaatttatttcaccttatcttggagtatgtaaaagtttatatgattttttctctaattattatgacgaacgacctgaacatcaaaaagataaatggaatataaaaagactagggattccatataatatgtctcgaagagacagatttcttaatttcaccagtataaaatttccctttcgggaattagttaaaaaatatgtaaatcaaacattacttatacaccaacaaattacctttgcgaccgcccaaaatattttaaagaaaatgtatttgttttttgatttcattgtagaaacgtatccaaagtggatagatttacagaatctacaaagacaggacattgaagattttttattttatgttagaaatcgtgaaatgggaggaaagagttatacgaaaaatcgtgttcctagtaatcgtcatgtaatagagtgcctttcaaatgtcagaagaataattgaatatatgcaaggttttgaatggaaagaagcacctaaaacccctgttaacagattaatatttcccgaagactttcctcgaagagaaaagaaaaactatcacgaacatgttaaacatgtgccagattttatatgggagcaagtgttggaaaatctacataatttagattcggaaattgcacgattaatagtcattatggaagcaacaggatttagagtctcagatgtatgtcagttacaattaaattgtctagcatataagcaagatggttggtggttggtaggagatcaacgaaaagtaaatgtaaaagaacatattgttcctatttcagaagaaattgtgaaaatcgttaaaatacaacaagaatatattaacaatcatgaaaagaagcataacaacttaaatcaatttttgttccctgttcttactggaaaaaatagagggatggccttttcacaaaaatcggttacctatgcattaaatcaactagccgaaaaatataaaatccttgataaaaatggagaaatatttctatttaagaaccatgcttttcgacatagatatggggtcaatctaattaataatggtatgaatattcttcatgtacaaaagttaatggcacatactagtcctgaaatgacattaacttatgcaaaaatttcagataacactcttcgtagggaatgggaaaaagttcaaaactcagtgcgtattgacacaactggagaattaatacaagccagtctccctgagcaggcagaagaaaacggtttggaactagaatggattcgccataacatggactctattcgtttggatcatggattatgcataaagagtcctaaggttagctgtgaattcttagattattcgttagaaaccccttgtattaaaaataattgtaggagttttcatgtagatacaacatttttagattactataatgcgcagatattaaagatggaagaagatattataaagtatcaaactagcggtcgtattcgttctattgaattgattcaaccaaaacttaataagtataaggaaattagggattcattgaaaaatgaaattggaattttcggtatgccgaaacataaacgagaatatataggagaggaaagaaaaattgatggttaacaaacatccgaatacaacggggttattgaatcatgcctctaaaaaaaagagggaaacacaatatagagtgaatgaagtaatacagttaatggttaaagaaggacaaaaaattaattttaattcagtttcagaaaaagcacaggtttcaaaagcatatttatatagagaacccttaatcagaaaaacgattgaagacttacgtcaacagcaagaaggcatacatgattttaagaatataaaaagaaggacatcggatgcctccaaggatgtaatcatagaaactttaaagaataagctcaatcttttaaaatataagaacaagctattagaaagtgaaaatgagcacttaaaaacacaactgaaaaaagatttaggaaaggtttatgaaaatttataaatatgtgatatcgtcctatcagttgtaaaataacacccttaataaagcaggatttgaacatttttattttaagaaatagaatttaaatcataatgatacatattaaaatcttttgaaaatacctcttgaaccaactgaattgtttctgcgtcataaaaactatcataagtaggtaatcgtggaaaaacaggggttgtaatatcagcgtctgcataaactcctttgtaaatcatcttactcccttgataatgccaagattttgataatagatctaatggtgatttttttaatttatatacctcttctagcttcgaaatacctgtgttaaaattttctagatggatatagtttgtaacaaattcttcttctccttgtatatattgttgtgtaaagtgaggatctacttgatctaattttgtcatgtgtgcttttaagtaatacaaaaatagtttaaaggaaatgggtttattgcaagtttcatcaccatacagaaattgccgaatgggtttccatacgggattttcaatatttggtggtggaaccagagcaacaaaagaacttactgcccttctataaggatttcttactagtttgtacgtcttcttctctttagtttgtaatccattagctaattgtgctaaataatgtgtagagttcttatatacttcatactcatagttgtgaatgaacggattgtactttatcgcttctttaaataaattaatttgataaaaaaaccagtgggctagcgaagtacatccgcttttttggctccaaaacaagatgaggggaaaatctttatgaaaatgagggacacgcccttgcttgtatataaaattatatagttctatatgatccattttgaacctccattcttatatagcaaaacatgaaatatttttaataagcgataactaactttagtccactaacaccaataatgatagctaaaaatatttgaagaggtttaacgggaatcttagtggagaatttactaccaagtatgacacctgggatagaaccaatgagtaagtgaattaataaaagataatctacgtttcctaaattcatatttagtatgcttgcaaccgtcactaataaaaacgcatgtgtaatatctgtgcctactaattcggatggtttcagtcgatataaatatatcattgcaatagcaaataaagagcctgatccaacggaagtaagtcccacgataaaaccgagtattgcaccgataagaattgttaggttctttttttggaccatagtctgtttttgaaaaaaactttgtgtagattcattatagaaaaatgtttttataaaaatagaaattgccgcaaggattaaaacatatcctaatatatattttataattccctctcgattatcatgaaaaattggcaagaaatgaattattattactgcgataattgcactaggtaaactcccaatagctagatattttactagtttaaaattgatggttttctgtttccagtgttgggatattccaaacattttagtgatagaattatatactagatccgttccaacagctacagaaggacttatgcctaatgttagaagaaatggagtcagtaatgcggccccgcctatccctgttactccaaccaatccccctatgatgaaacccatcattataatagaaatgctcattataattccccttccataccgctggcttttcatagtggttatagtttttaaagagactctatacatagtcgggtgataggtatattagttaaaaattaatttcattcttcttatatccatatgcttcaaaatcgtcagtaaatatttctgaaacaaggtttagagcttcttcatcataaaaacttcgataggttggtaatgaagggaagtgtggatttgtaatatcatcatctgcataatttcctttatgaatcatttgatgtgccctatggtgattggagtttgtaaggagtgatatatcagaagaaagtaatccatattctttctccagctgcggaattattgtattaaaattctctagttttatattttgtttgatgaccttttcttctccctcaatatattgttgtgaaaaatgttgatctaacagaatggatttagcccctatttcttttacataatataaaaattgtttaaatgaaattcctttcgattcatttttatcattataaaaatactctctaatctgttcccattgtttcgaggcgtaagggttgtcataaagtattaaaaatgagcttacagctcttttataagggttgcgcacaagttttatggtatccttacttagttccaagagttgcatttctaaatttgtgtagtaatcaactttatttttgtatatttcagattcatagtaatgaatgaacggtgcatatttcattgcttcctcatataacccaatttggaagaaaaaccaattcgccagagaagtacaaccacttctgtgactccaaaataaaattatggggaaatctttatgaaaatgtggaatacgttcgccatattcaattaatcctttaatattgttcttcatcagccaaaccccttcgttattctgatatttattgaacacttaaatacaatggtaactactcataccattgtatttaaacaccactgtaaaggtacttaagttggcatataaaatcccagtgtattaaaaacagcttacataggtgtcttaattttccaggtttatcaaaatgtaataattgcttaacaaactttaaaatatagaaatctattataaagagaattatgtatgaagatatgtatacaacgatagaggcattaatatcgctacaataatcgaaaaaaagtcttgataaagtatctcatataactagatactcacgggtttataggtaaatccctttcctaaaaaacctaactttatcatacgaggaggttttgttaatgaatttgaactataaaggtactaataaccaaggtcgtgccgaatggattgaatcggatttaggggaagtaatggaagaatggcaactgaatcaatataggccgtttgtggaattcttacaagaacacatcagtcgtcagttgacaaaaaacgaactgcgaacaattttatggttatcagggttcgagcaaagctctattaataacatcatgagtatcgtaagtgcagcccacgagcatggaaaaaataaaaagtgatgaacattccataaattaaggggcctttttattcttaaacattaacaaaaagaaaaattatttacatcattagaaagggaattgttcatgaaggaaatcgataaatacatgtttcttcaggaagcagctatacggtgggggatcccctatgaaacagtgaagaataaggtgaaaccatctttagtaaaggaagaacagattaacagtatgattaagcgtggtttaattaaatattttgaaccacctcgtgatccaaatcgcatctataaacgagatcagaaaacttggcttgtatcaattgatgcaatgcatgagtggtttggtgaaccgaaaaataaggagtaaaaataaaagagaaagatgtttccgcgcctggcagcctggaaaaacaccttcctcttgtatacaaacataattttagaaaggatggttgtcatgaaacaaccctttattaaaatcacgtctggtgagtctattttaacacaacctcaccaaaaaactaaatccttcaaaaaaatacgtccattaatttcggaaaattacaaaaagttaaacatctattttggtattgaagaaaatttctcggatcaaatttggttctatggattctttggagtatctatttctatgatccttttcacatatgttttatcaggagttatgtacggtttttaaaaaatagaaattataaaaaggggaatttaaaatgatgaagtcggttcaattattaaaaggtgaagagtttgaaataggaacaacagataaacatggaaatccattaaaacaatctgattttgttgtaacacaaaacgatttcgaagggattagtatatgccgaattttatataacgggattacaaaagagtttgtagcaatgagttcgtctaattggtggatcccatatcatgatttatcaatcgtaacagaacggttagatcatgtaattgcaaaggagtttttaggattggaaaaatgcggtggatattggggcaagaacaatacaccatttataagaatgccgattaaatatttcaatccagttgaagagtcaacggccattctagagaagctaggaagacagtatgatgacttgtttacggtgaaagaaaagggatgttggtatttgacggtcaacaaaaaaatatatagtgaagctcgtcttggcattgcatcctgtctagcggctatcgatacagtgagaaataatgggtaaagtaaatcggtaatttaggggagaagtagattgttaaataaattgataaagtgagggatttaacatgatgcatgcacatttacaagaacaagcctattggaaagcgcaaaaaaaggtactgcggaagaatactaataagttactaatttccttagaaccagatttgtatgaaaaactacagggattggttctttacgatgagaagatggatcatattgcatcggagttggtggtagagggattggattacatttatatggaagacattccagtacgtcagtaccaggcttttcaacattttgtagaaataaaattgtcaaaattccaagagaaacgattacaccgtttagcgctaaaaagaggatgttcatcacgcagaatggcttatactatattacatttcatattgaaggaacaataaaagaaccctacaaaaagcaggattctttcgctagggtattctgatggcaaatgagctattactatcagaagttgagtggtctagactcaatcttctttataatattatagttttaaatcgaattgcaaggataacacaaatgtaatttaaaatcaggagtttaattgtataatgcttcgtttacatacaaaaagattgggataacccaatctttttgtatgtaaggaattcgataacagactaaatattcaactcattttcattacaactaaattaaactgaaaattcaatccgatattctttgaaagtattaaaatgtctgaaaatgaaaggaggtctactacttcaaatctttgtgtggtaaaagaaacaacataatttgagaaacaaaatgttaagtttttatttaaattggattaattctgcccttctgcaaatgtgtctgattgttttaagatttatgaacggttttatcttacttgactgaattttattcagtcaagtaagattgaattagattcagttgtaaaatgtggaattaggcttcgaggagaatatcacaactattgtgggaatttggtatcaacaaaatgatactgatattgcattgaaaacaagggggactctattatgaattataataaacaaaatcatccatttgatacagcaacgcagttgactggggaatctgggatttattacgggtgcacctctgaatgttatgccaatatggttgggccatttggcggtattattgcggccactcttcttagagccgtaatggagcatccggaacgaaaaggcgatccagtatctctaactattaattatacagcgccggttttggacggcaatttcagcatcaaggcaataccgactagaacgaatcgatccacacaacattggtatattgaactctgtcaagataaaggtattattatcacgggtactgcagtttttgcaagccggcgaaaaacttggtcttctacagaaaggaattttccaaatgtaccatccgcaaaagaagttaagaatttttcatctgaagggctgccaccttgggtatacaactacgacatgaggattatacaagggacaccactcgcattatcacaaccaaatccaaaaaatacttccgattctgtcacactccaatggatccaggatgaaccgcggagacccatcgatttcttatcacttacagcgatgtgtgatgcgtttttcccgcgtatttacgtgcggcgcaaacaaatggttcctgttggcactgtttcacttaccgtttattttcatatcaattcagaagtgcttactaaacatggtgataaagaggtgttaggccatgctcgcgcgcttcaattctacaatggattctttgaccagaccgcggaattgtggagtcctgaaggaaaattgttaactacaaccagtcagcttgtctattacaaagagtagagagttgcaatctatacttaaaataaaaagaaaagtagtttaaatcaaagaagattatggaaattatatagaacgaatatcacaagaaataaatactcctatacttcaatcttgcgctttcctacaaaaatggaacagcgcttatttttatttgcgtatagaatttttaatttaaagtaatcgaacttgactgaattaagttcagtcgtgtatgattgaactcgattcagtcgcggaaaaataatataggagatgaattatgaaaagaatatcaaaagaacctgacattaggcgtcaagagttaatggatattggttttgaactttatataaaaaacggtataggaggctttagcataaaggatgttgttaatcatgcaggtgtagcaacaggtttattttattattactttaaatccaaagataattttgttgatgaacttttaaacgattttatcgcaaaaaatatagaaaaaattcaacaaatacttactttgaatgaattacccgttatacaaaaaatgaaaaatgctctggatatattttggacatttgttgaaaaattggctccctacaaagatgccagttcatttcatacagaacaacattacctgcttgagcaaaaattatttatgcaattacggccactcattgaacaagttattgaggatggagtaaaaataggagtattccatacggacaacttatctttaacttctggatttattttatatggtcttagtagtattgcccattcagagatagatctaactctaaatacgaaaaaagagacgattaatctaatcttaaccactctaaaatacgaacaaaaagaagaaaaaatttaaaataacatcatgggaattttattttcagatatgtttaaaagaaatacttaggttatattcaataaattgactaacaataagagtaaaaacaatcgttggaataatacttgatgaagagcaaaggagaattaatatgaaaatttatattgaggggaaaaatatttcaccagaagaactcacaaaatggaaaaaagaacgtattaagaaagttttcaatacattaggacataaagagcctaaaatacatgatacaaatgacatgataaaaaaactaacggaattaaagttaagatattcatacaatgaaatgtacgataagttgagatttaaacttagattgagcgagatgggcatgcgtattggtacagctttatctggtgatagacggaaattttcaaaaacaagtatttatttagatggaattacagcagaagaagcgataaatggaattgatagttttatgcttgaacagtcacgtgagaatgatcaagtgaatttatcagcttgtcctgatcactatgtattaagaccttttggagaaaatgaattagaagttatagaaactactggtaattctccgtttccagttcaattctttattgtttttggtgacgaaactaggttgcaaacaccgagagataagtcttatcaataccaatcaacaggtgtagcacgtatgaaagatggaactattatcggtggagttcgacatcaatttaaagatactgatactgggatagaagtaagtctagttgttgagtttcctgcactttgtcctaatagccttattaaatcgcatcaaatgcatttagcatgtgagttttcttactggttacagtggataaaggatcataaaaaataataacggcagagcttcttgaaataaaaaatcatatttttttataattaaccctgaacttattatatgtattatatctgacgacgtctttgacataatcactgccgtcgtttttaatttatattttttagacagagaatacttcagtaggagagactgggtttctatttaataataatgaggtgtaaatttctatgttttccatacttttagctataagttttggtgctgttttcgctttacaaacagccatcaattctcaattaagaaaatttgtgatttctccttttttagcttcaatgatctcatttgttataggagtaatcttcttaactattacaatattaattagtggttcaccattagggattccactagacttatttttgaaccaacctatttttatatggttgggagggattggtggggcaattgctttaaccgctaatattcttttgttccctagattaggtagtgtgcaaacatcgataatgccaattttgggaatgactttgatgagtatgttaatagataattacggttggtttaattcaataccgtatccatttggatggagccgaatttccggcgtgttactagtcttaacaggtgcctttttagctatacaagacaaaaatcatgagaaacaattttctaaaacaaataaaaaaaacatggtaaatcaatggatttggcgattggttggtataatggctggaatgttactggctatacaaattgctatcaatggtcaattaggaagggttctttattcctcctcacaagcagctcttgtttcattctttgtaggtactattaccctaattataatagtcgggataatggaccgttcttacacaaatattaaagaaccaattaagcaatcagctccatggtggatatggcttggagggatattaggcgggtcttatgttctaataaatgtatatctagttgaccaaattggaaatggacaaactgtaatctttaccttattcggtcaaatcattggtagcttgatagtagaacaatttggattgcttaattcttcaaaaaatcgagttaagcttatacaaattttaggtttactggttatggtagctggtgttttttttattcgggtgttttaaattattcatgaatatctttctttggaagtaacaaataaatttagtggttttttattttaggaggatactgttttattaggttgatgggtatggggcggtactcctaaatgaagttaataatgttataggggtaccgccacatgcccatcaacttaaggatagaaactctacggttttccattaattgaaatgaacaaacttttaaacagtataatcgatggcttcctgccatcccttgttcgaagccaattcatctcccacctactcactgggctgtgacccttcacgctcctagaggaaggagtcttcttggctaaaatgataaagtattctgctcgtagttaatacttagcaatattaaagagaaataccaatcatttacttgtgtaaatgattggtattctttacgttagccaatataattttaatttaaaacatggtaagcattcttcctcattcatcattgcaaaaaaataaaacgagaaagattagaatgcgaattcaggtgatgtttttatcatttactaatattcgagttcacttcaatgtgcttaagctttttattttttactctattagatataggggcctatcaataatttatttaaattagattatttaggcaccctcttccgaatcccacacttcaataatatcattgcattaattttctttcggaagtacaattcttttatacaattgaactgtaatcaagtagtaaattaagtaaatcactacgaaaatgacaagtggcaaccaaattcggaaatacggatcaatcaaaagcggaccgaacatgttcataccaactaatatatgagcaatacccacaattgccggtactaagaatatgaagaataactctttataaatcgattgtgttaataccccccggcggacaccaattttacgaagcatttgataacgtgtgctgtctttcgatgcgccagatagaattttaaacattaggcaacttgccatcattgctaagaacgcaattccaacgaagaagcccataaacatgaatccactggccataccatgactcagattatacatttgatacgtactacctaattcttccgctttcacatttttatatttcgctacctgtaattcatcaagttttttccattcttttaaatgtgctccaaaatcatctgttttcccaataaacacagtattttctttatccttcatactatcgtatatgctttggtctataatttttatttcatgatcaggatacatataacttggctggattgtgaagaaagcttctttccattgttttgttttcgtatcatcgttatacagtttatacagttgttttggcaatttaaatgcatccttaggaaattcctctgaaactttcatcatcttcctattttcactatcttgtgctaaaggacgatttttctctacatcttcttttatataatacacatactgatcatctactttgtagcgatattcaaacttctcttgaaataagattccactcaaaattttcttttcttccgctgttggattatgaacgactgaatcgtaaactttttctttatcagtcgtctttagaacgttatttttaaatgccataccacacgcaattccaccagcgccaagagccactaggatagctaccgttgcaagcacccgtgttaggctattaattcggaaattcaattgtgcaaaagtaaaagcattcagccctttttcacgacgttttttattactctttatcttgttaagcataactgggagaagtgatccaaataacatgtaagtaccgactgttgctgtgattaatccaatacccatgaatttaggtacagttaatagctcttttccctgtaaatgcgctatatggatcagtgatgcatacccaatacctagcaaaatcagaccaaggaatgcaactacacctgtcatttttccttttacagcgatacgctctgtttttgcatctgcatgtacaagttgtaatacagaaatacgagagaacttcatgctattcatgattgctgatactataaatagtgcaaagaaaaagaggcaagtaacagtcatagatggaatataaaatgctttataatcttcactagagaattccaactgcttcattaataactgaccaataccttctgcaagccctgtaccaactgcgattccaattgcaagagatacggcacctattacgattgtttcaataaacataagtaaggtaactttatacttttttgcccctaacatcatgtacataccaaattctttttggcgaattgataataagaaagaatttgcatataaaatatagaaaaacgttacaatcgctaatagaaaggaaccgatttggaatgcaattgcaaccgtattagcatgtggattggattcaaggaacgctttatttagtgctaatgtttgaaacatataaaaagttgaaatagatacaatcagaccaacaagtaagacaatgtaatcttgcaacttactttttaggcctgacatggaaagcttaaataacatgattgaacttccttccttacgctttttgtgtacctaagtttgcaagcacgtctaaaatttctttatagaactcttcacgtgtactaccgcgataaatttctttatatagctcaccatcttgaatgaataaaatacgttgacagtaacttgcgctgtaaggatcatgcgtaaccatcataatggatacaccttgctctttatttaagcttgtcatggcatcaagtaaactcgttgcatttttagaatctagagctccagtcggctcgtctcccaaaataattgctggttcatgaactaacgcacgtgctgctgcggaacgttgcttttgtccaccagatacttcagaaggatatttttgaagtatcgctgtaatccctaacatatcagctactttttctactttcggtccaatattacgtgatggaacaccttgaagagaaagcggaagtgcaatattttcataaatagataaattctccaataaattgaaatcttggaaaatgaatcctaacttttgtgaacggaaatcagaaagttcaccttgcttcattctcgtaatatccgttcctgcaatttcaacaacgccgcctgtcgctttatctaacgttgaaattacatttaataatgttgttttaccagaaccagaaggccccataataccaacaaactctccctcttgaattgagaatgatacaccttttaatgcgtgtgattgattctcaccttttttaccgtacaatttttgaatgttctttacatctacaaccggttttatcatttatatcctcctacatttttttatttcattacaataagctactaaatttgtttactactaacaaaatagacatgttacctccacccttaagctacaatgaaatctttccttttatcttcttcactcacctcatcactttgaatacacccatgataaactatgaaaattaggaaacaccccgtaaaatccttaagatttcttaagttttaaaaaaagcttatggaacctgtagttccataagctttctatctaattggatgttcaacaataaaagacatccaaccatctttatattctgcatgtatattaccatgatgaagttcaacaattctttttgaaatagcaagtcccagtccatttccctgatcaccttttcttgccttgtcccccctgaaaaacctttcaaacaatttatttggatcgctaacaggcggtctctcaactttatttgatactttcaaaattgccttgttacctattagttcaagacatatagataattcggatggtttcatgctgtactttatcgcattcataaacagattttcataaacacgtaccattttttctacgtctatgaaaataggtattgtttcttccgttattgatttttgaacgattagaccctccttttcaaatataggaatgtattctccaactatttgttctaacaaacctgataaatcaacttcattaaggtttaacttaacatcgatgcctgataaacgggtatattcaaacagttcatcaattaaatatttcaatctctttgattttaaataagtggtttcaaggtattcctgtaattgtgtgttactttcgtattgtcctctttttaataaatctatataaccaataatagatgtcaatggtgtgcgtaagtcatgagatatgttagttatgagttcattttttgtacgttctaatcgtctttcctgttcaaatgtattttccaattccttggacatatagttgatattttgaacaagttgggtcaattcgtccttccccttaatcccaatggtcaaacccagttttccattggcaatatcattcacattatcagaaatgagcttcaaatatgctattttctttcggaccaatatcaaaaaaatcactataaagttaaaaattgcgaacgagaataagaataacaatgataaattgaattcaaacataccaaactcttcgtgttttttaaataatggatctatgacgtatagcaccataaggattgttaaaccaaatgaaacaaaaaaactaactgcaacagcaccaagaagttttataatgatcttatttctgaaactaacattcttcatattttatacccaattccccagacagttttaatataaataggatgtttagaatcctcttcaattttgtctcttatttttgtaatatgcaccatgacggtattatctgatttataaaaaacttctttccaaactgcttcatatatttttgctacactcaggacaatccctttgttgcgggcgagtagttcgagaatagcaaactcttttggagttaaccttgtttcttttccccttacccatacttgacgagtatctgtattcacggtcaagtcaccaatttctagaatacttttattatgttctatggccgtattgtattttttaaaccttcttaattgggattttaccctagcaattaattctagtgggttaaacggttttgataaataatcgtctgcaccagaggctaggccctgaattttgtctatatcctcagattttgcagatagcataatgataggcatattgcgatcttccctaattttcatacatgcttcaatgccatccatattcggcatcataatatctaaaataatcaaatcaaattccttttcttctaacagttgtaaagcttctatagcatcttctgccttttgagtttttaggccttcattttcaagatatacagagataagatttctaatgtctttatcatcatcaacaataagaatatttgactccatatgattcctccacatttttttcgtattgaaaaactacagacataagcagttgaaacatttctatcttctcttttttataaacttgcaaacggaagatatgaaataacataatagatacaagtaatatcgtttccccctaatttaatgttcaatatttactgctgaaccatctacaatacatgagtttccttttgcttttaattaattttcccgtgaatacacctgtacttagtccatatttgacaatataatttactttttttcaaatcagcttcttcaatcaatttgtctccaagaaaccttgaactcggaagaggctacaccaactaatttttagttcattatatacaaaaataagaaagcgaattgttttcatgtttaattaccccactggtttgaattcataattatactctagagtccaaaccttaagaaaaaagggcaaaagttcttaagaattcttaagctttatacaacagtttgttcagaagaatatatggctactcttgaaatattcactattagcttctcattttgacactcccacggctaaagccgcaagtcctataacttacggtgtaacggatgggattcttgaatgactaagcattcgcagtccatttctgttttgaacagccttcaagatgagggtgtgccatcccccctcctaagacagaccttataggttcttaggctgattgactattaccgccaatcacagttgcgtagcgaatattcatcgccccaacgatatcaagatgtttctcaaacccacattggcacttgtattttctgtcttgcgccttgttttttccagaacatttcggacatgtttgacttgtataagaagggttcacatattcaacctttatgccaactaatgtcgctttgtactcgatgaattgtgctaaacgatggaatgaccaagtgtgtagatttttttcgtttttacggcttgttcgtgccgtctgtctaatgttcgttagttgctctaatcgaatgacagaaatattattatccgttgcaaaatcaacgattccacgacttactttgtggtcttggtcttgcatccatctttttaatttcaaatactagcgaagaaaagttagagaaaataattctctaacttttcttgtatacataactttattttaagaaagtaaaaaacttgtctcccaattatatgagattaaaatctaaacgattaaaactaatgaaatagatctttttaattacaatgtctttttttagtaaataggcctttgataactaaaaattcttttgtttttcagttgacatactaccgcaggtcttatatactgcatgtttctattatacgataaaatagaaaaaaggcagaaaacgaagctcgtcttctgcctttttgtaatattattatttcgtttgttgtttattaatagacataatgaacagtccaacaatcccgcctactaatggaagcataatctctcctgctaaattaaagtaggagcttaagaataaaccatttacatcgattacccagccagtaacatacaataacatcatatatagtacgaaataaaactcgcgatttgaaatcgtttcatgttgtgcagttttcataatggacaccatccttttcttttataatggaatataaactgtcacattttgttcacatttcaattgtaaaactttccatcataaaagtctagtagtatgtgtcgaattttgaacggaaataaagcgttatcattatatcttataagtacgtaataagagatgtatattcacgaatgtagtatagtataaacatagaatgatagtgaagagaggggcaaagacaatgacagtttatgatttttcagctaaaacaattaccggtgaagaaaaatcgttaaaagattacgaaggaaaagcacttcttattgtaaatgtagctagtaaatgtggtttcacaccgcaatataaaggattacaagaggtgtatgataaatataaagaccaaggacttgaaatactcggattcccttgtaaccaattcggaggacaagaaccaggtacagaagcggatattactagtttttgtgaattaaactacggtgtaaacttcccaatgtttgcaaaggttgatgtgaaaggtgataaggctcatcctttatatacatacatgacagaacaagcaccaggtttactcggtatgaaagcagtgaaatggaattttacgaagtttttaatcggaaaagacgggaaagtagtagggcgttttgcgccgcagacgaagccggtagatttagaggttgagattgagaaggtacttggagaataattaggagtttcactttattaaaaaacgtctcaaagaacaatgtagttctttgagacgttttctttaaactcacattttcaagattaaattactgtatcaaagtcatctgatttaggtagagaagctgcttttttcataagcacttcccataagtgtacggttttcttccattctgctgcaacctgcccctgtttatacatagcattctcataactggcagtaagttgttgcatatcggccgagttgtaaagtgtatcgatatggagagcgtattctcggaatgtttgactttcaccccgtggcatgccaattctcgcaaattgttttaaaagtgcaccgtaagctttttgataaacagcatcatcttttcggtatttatagaaatgaataataagaaatgtcctccatatcattctagtggtgaagagaatgtatcccataatactaattagtatcgtagagaggaatacgtaccaccaagaaaaactagtttgagaatttgtgacctttttagtagaagcttcttctgtattttctattaaacttttaagttttgcttcattatttcgttgttgtatttgcgtgttattagaattatttgcttcgctattttgtgaaataggagcaggcgtattatttataaaattatagggattagtaaatccttttgttggttcgaatggaatccatccgtatcctgggaaatatacttcggcccaagagtgtgcgttatcgttcgtgattgtataaacattctcaccttctgcagaggcaagtgtattgtcaagagttccttctgtatagccttttacccagcgagcaggaatcccggcagaacgaagtagtacaatcatagacgtcgaaaaattattacagtagccgctttttgtatcgaaaaggaattgatctacataatcttggcttttggcagggaataagacattcgttgattcgtatgtaaaagagttgtctgtaaagtaattttcaatagctaatactttatcatatcggttgtctttatcatttgtaagattgacagccaagtcttttacgcgctgtggtaatgacttgggaagttgtgtgtactttgtcataaaataaggatttgtttcttgaccttcatttgtttttacagctttcaagttttctatggaaaactcagggatctcatatgttactttatacgaatgtaaagtagtagaagagtctccattcattgtataaattttttctgaaaacgggtcaacactgtatgatacatcagaagcagcctcaactgatactaatcctgctggataggtaagatgagggtaacttttttgcatggtaattgttgcctcagtcgttttcatttttgtattttgttcgtaccagcttacgacgtcgtttttatttttaaaagaaatctttttcggattttcagaaatttcccagccttttcctgtataaaaatcttttgtttctactctccaatattgtttgttttgcgttcgtgctgtgaaaacaattgtaggatccgccttaaaaggaccgcctaatcgcgagtcatctaaaccatacccaattgtagaaactttttgctctttacttgcttcagatgtgttgaattttaaaaaatccattgggtttggccattgagggccaaattttggagcaaagtatgcaatggttgctaataatacgataaatattgtaagtggtctaagtaattttgagatttctctagcataattttgtaagtgttcacgttcttttattcgttctacttgaagaagactaagcataaaaaagccgatgacaacagtacgaataatagcgtagtttgcattgtataaatgtaagttatgaaaagttgcgatataaataatagtcaatacaaggaatagaaacccacgttttttatgaataatccaaaatgaagtgaaagaactcaaaaaccaaaatgagagaaaaaataaaaccgtcggaaaaactggagaaatatctagtaaattcccttggaaaaacagggaggaatttcgaaacatattagaaaagaatgttgttagccaagatggatttataaaagcatttttataatatagggaatgaatgataaataagactgtgacaatttttataggaatctgccacctcgtttgaaaaaaagagagagcgaagcaaattcctataaatgttacgaaaatatctaatctacctacatttgtaatgcctataagaggtcttagccattctagtaaaagaagaaatacacatgcatgcatgaagaatctgttcgtatcccacttgtattttgcttgtaatatcatcatttgctcacctcaaaaaacacgtttgtataccggttttcataaaccgtgtttacaaatatttgtcgtttttttagagtttctagtatactgagttctcggtgtgaaagttgattcgctttttctttcacgacaaaaaccatacattttctatttcttatagcagcacaatcagccgccttttgaatatcgggagaaagattactggtcacgagtataaccgtgacgggctcataaatttttcttagttccatgtctacactctgggagagcggaaatacactgtctgcttgtacttttgctaaatgacaaaggatttgttgtaactgcgtatctccattgtctaaagggaaaatagtttgttcttttccgatagacacgaatgatgctggtgaattttgtttcaagacagcccttacaatagaggcagtaaatgtgacgactgattcgaatagaggagactcgtttctgtctatgaatatcatgatattatggctgcgctgttgttcaaactcttttgtcataatattgtttgttcgtgcagttgctttccaatcaatccatgaaaagcgatcaccaggtttatagtctctgacaccgacagagattgtagagtcttttgctgaatttatatttgctgaaagcgctccttgttcgaaatgattttccaattgtcgatacgctatatctacatactggggatagactaaaaatgtatctggaactgaaaaagttgcttctttctctatcatgccgaataaatcgccggttttgacacgtacgcttgaaaaagtgtgctcgcctctagggattgtgtcaataacatattgaaacgaaatatttcgttccaatcctgggaagagtactaccttattcatctttatttgtttacaacttataaattgtggtggcagttcatcttctataactaaataaagtaagggaaaaggaaattttctttttattgtaatcgtgcttacaaattgttctcctactacatatccattctggtttgttattcgctttacttcagcgtcccgtaaagcgtagaaggggagtagtagcgaataaagagcaatgggaattatgctgtaaaataaaaaccaactgacaaaccctccttgaaacatagcgtacacaaatgttaagactaggcataaagggagtagcaataacttcataacgtgatatagtgctcgcagcattcgtttcatcaagggttcatcgccctttgagtaggcacggtagttcgtgcaacgatttttgcgataacttgttcgccagttattccttcaaattttgcttccatttttataatgagtctatgtgctaaaacgtaaggggctaaaagtttaacatcgtctggaataacataattcctgccatggataaatgcataagcttgtgaagctttcattaaagcaattgagccacgtggacttgcacctagctgtatagaactgtacgtacgagtctgattaacaagctttacaatgtaatgcttaattgctttgtccatacttactacccgtacgctttgttgtaaataaagtaattcttctattgtagtaatggtctgtaattgagagagtggatttgttttttccatccggtttaaaatttcaaattcttcctctggtgtaggatatcccatttttagtttcaataagaaacgatcgagttgagcttctggtagagaatatgttccttcatattcgaccggattttgtgtagccatgacaaagaacggctttggtaaaggccttgtaatgccatctattgtaatattgccttcttccatacattcaagtaaagcagattgtgtctttggagatgtacgattaatttcatcagcaagtacaaaattacccataattggtccaggcttgaactcaaattggagctctttcggattataaatagaaactcctgttacatctgacggcaataaatcaggtgtaaattgaattcgcttataatcagcatcaatggatttagaaagagcacgtactagcattgttttcccgacaccaggaacatcttctaataggacatgaccttcagctaagagagctgtcaaaactaagatggtttcttttcgttttccgaccattattttttcaatattattgattattttttctacagtgggatgtaatgaatcaagctggggcatcgtaatcctcctaatgttattatcgttttctaatctatttagtggacatatttctaattctatttgtagatagtaaaacttccacctttaattctgagaatattcagattatttattttgattatatctagtataattgtttccgtaactaagggcaatacagtaaataatgatttgtagttttatgtaaaatcagactcgatataaaataataacattgggaaaaatttttttacatacaatttatactcttttccttatagcagttttgaaataatatcaaaactctttttcttttgcaaaatagtcgatacctcaaaataccattctcctaataatcacgattaaccataaccttcacaacggaacaaaaggttttctcacaaacttattctctaataaatttttgacaatctcttgaactgtgcgaaatgtcacatctgtattttacaacctctcttatagtaagggtatgtaagagagacgtattaaagacctgcggtagtatgtcaactgaaaaacaaaagaatttttagttatcaaaggcctatttactaaaaaaagacatcattttagcaaagaaaatgattgattttgtacatgcttaaacaagcgaaaatgtacatgtttatcttgacatttacagcctacgaatactttgcttgcaaacgttgttttatcaggctttttgttatattttcacctcattgaaatgcccagtaacggtattgtaaaataccgtctataattgataacctatcgtaatgtagttgaactataattaacctctttgttacgctaaaaggaattttcagtaaaaagagatgatgtgatattaaaaatttgtttcttattttttattcgtattgcaagcggttggattgttgtgcaaaacttcctattaaatccactcaccgttccccccactagatcaaacaggacagataattgcatatatcaaactttatacttaatataaaagacttcatctaatatacgcctataaggaacatgccatctgaataagcaaaataatatgcacatagtttatacagcacacttaaattcatttgagtgtgttttttgtctactttatgaacaaagcttttcttttaacactattatggaataattatacttttttacgttgacaatagtgttgaaggagaatatactaagcatgtaagttgattgtgaatagtttcacaaataatgtgaatttcttcacatataatagataggagttgtcattattatgagtacttggacacaaatttatgacccattaaacaatatttggttatctgcactaatcgcagcacttccaatcttttgtttcatcatttgtttaatgggattcaaaatgaaaagttacatggctggtctttatagtgtaattgtcgctattatccttgcaatatttgtttataaaatgccagcaacagtagctgtagcatctgccggattcggtgttttatctggattttatccaatttgtactatcgttatcgccgcaattttcctttacaaattaactgttaaaacagagcaattcaatattattcgcgatagtatttcaagcattacaaatgatcaacgtttacaagtattattaatcgcttattctttcggtgctttcttagaaggcgcagctggtctaggagttccagttgctattacagctgcactacttgtaggtatgggctttaatccattaaaagcagcaggtatttgtttagtagctaatattgctggtggtgctatgggtgctatgggtattccagttacagtaccagcacaattaactcaacttgacgcattaactattggtcgtcaaactgttcttattttacctttcattagtgttatcttacctttcttacttgtttcaatggtcgatggaattaaaggtattaaagaaacttggcaaggtattcttgtaagtggtgtttctttcgctattactcaattcgctgtaacttacttcttaggcgcagaacttactaatattttcgcagccgttgtaagtatgatctctcttgcattattcttacgtgtttggcaaccaaaatcttctactaaagaagaaaaacaagaaactaaagtatcacatacattcaatcaaattttatatgcttggtctccattcgtattcttaactgcatttgtaacaatctttaacttaaaaccgattaaagctttatttgctccagatggtgcgttagcaaacttagtatttaacattcagttccctggtcttcataatgctgttatgaaaactacaccaattacaaaagctgatacacctttcgcagctgttttcaaatttgatgtattctcttctacaactactgcgattgtactagcaattatcgtttcacttatcgtttaccgcgtaaaaggtaaaatggttaaagaattaatgattgaaacaatgaaagaattaaaagctccagtatatacaatttgtagcgttatcgcgttagcttacgtagagaactactctggtatgtcatctacacttggacttgcattctcttctactggtaatgcattcccaattctttctccaatcttaggatggattggcgtattcattacaggttcagtagtttcaagtggttctttattcgcaccacttcaagcagtaacagcagaccagttaaacatcgtcccttctacactcgttgccttaaacgtagtaggtggtacaatggcaaaaatggtttcaccacaatctgtagcagttgcttgtgccgcagttggactagttggtaaagaatctgctctatttaaaacagcaatgaaatacagtttaatcttcttagctgttattagcttacttcaattaaacgctgtatttaatatcttttaaaaataaaacaccgatccaaatggatcggtgtttttcacattacatttctttattttttaataaagaagctccagcaatttcagggtgagtcatttcgaatggatctaaaataatatccaattcctcttctgtcagtacaccatgctctaaacataactccctaacagattttcctgtttcaatcgcttcacgtgcaatacgagatgctgcttcataaccaatatgaggattaactgctgtaataattccaacacttttctcaacatattgcttcagcaattcttcatttgctgtaattccttcaatacaatattcacgaaatacacggaatccattattcataatactaatagattgaattaaattaaatacaagcacaggctccattacgtttaactctaattgtcccgcttctgatgctaggcaaattgtatgatcatttccaattacttggaatgcgacttggttaatcacttctgccataactggatttactttacctggcataatcgatgaacctggctgacgtgctggcaattgaatttcagccaacccaacacgtggcccagacgccataatacgaagatcgtttgcaattttagacatgttcatcatacatactttaagtgctgcagatacttctgtgtatgcatctgtattttgcgttgcatcaactaaatgctctgcaccaacaagtgggaacccactaaacgttcttaaatgttttaccacctgttcaatatacgtaggatttgcatttaatcctgtaccaacagctgtcgctcccatattcacttcatataaatgttgacgggactgtttaattctttttatatcgcgcgcaagcactcggctatacgcttcaaattcttgtccaaggcgaattggaactgcatcttgtaaatgtgtgcgtcccattttaataacgtgatcaaactcttttgcttttttaagaaaagcagaatgaagttcctccattgtaataagaagcttttctaacatcataagagttgcaatatgaattcctgtcggaaacgcatcgttcgttgattgggccatgttcacatgagtgtttgggctaattttcgcatacgcccctttttcatatcccatacgttctaacgctctattcgcaattacttcatttgtattcatattaatagaagttccggctccgccttgaatagggtctacgataaattgatcatgaaactttccatcaacaatttcttgcgctgcttctgcaatttcatgtccaatgtctttagctaagtaaccagtatctatattcgcaagcgccgccgcttttttcacaattgccattgctgtaatgagtgatggatgaatgcgatatcctgtaattgggaagttttctacggcacgtaatgtttgtacaccataataagctgcacttggtacttctttttcacctaaaaaatctttttctatacgtatatccttcgttgctatcatttttatcacctatactttttcattctaaatccttatccaaaaaatccgccctctaaaaacacgagtatcattcagaagaatttttcagtatccaccttcactatatagtaccttttttgaaagcgcaaacatttatttttctgtatatcctttttattaaagtttatagaaaatcattctcctactttccttatttccactcgtttaatttgatgcatatccttttcaaggactttaaaataaaaaccgtgtttctcaataatatctccttcagcaacgatttgtttttgtaccataatccagccaccaattgtatctacatcatcagcaattaaatgtatgccaagcaaatcatttacttcactaataagcacttttccctctacgattttatagccttcacttacatgctctataggtggattctcatcttcatcgtattcatctcgaatttctccaacaatttcttctaaaatatcttctagtgtaacaatccctgctgtaccaccatattcatcatacaatacagctaatggaatgtgttttctttgcatttgtaatagtaaatcatgaattggaatattttctagcacttcaataactggccttgtatatggcataatcgagcactcctcgtcccgactaccatccatataacgaataaataaatcttttacattaaccatcccaataatttcatctttatcttcaccaaatacaggatatctcgtgtacttttcttgcgcgattactttaatatgtgtttcaaatggttcgtcctcatataagcctacaacttccgtacgaggtaccataatttcttttgctactctattatcaaattcaaaaatattatttacatatttaaattccctttggttaatctctccgctctcatagctctcagataagattaaccttaattcttcttctgaatgagctacttcatgttcagaagctggatttaatccaaatagaccagttacaaccctcgctgaaccattcaaagcccaaataaacggatacataactcggtaaaaataaataagtggcttcgataacaataagctaacttgttctgctttttgtatagcaaatgtctttggagcaagttccccaatgacaacatgtaaaaatgtaattactgcaaaggcaataataaatgaaactgtactggaaattgcaggtgagaattgcaattttaaaaacaacggctcgagtaaatgtttaatggttggttcccctaaccacccgagccctaaagcagtaattgtaatacctagctgacaggccgataaatattcatctaaatttgtagttacctttttagcggccagtgcacctcgtcttttttcgctaacgagttgatcaatacgactgctacgtaccttaataattgcaaattcaacagccacaaaaaatgctgttaacccaataagaatgactaccatcaataattttaaaatatccacatatgctctttagctttcttagctaaagttacacctccttttaaaaagaagtttcactttagtttcttcaattattggaaagcaactctatataaaatccaccaattttcaaacctcatacaattctaaaggtaaaccatcagggtcttggaaaaagacgaatttcttccccgttatttcatcaatacggatcggttcggtctcaacaccacattgatttaaatgcttcacagcttcttctatatttgtaacagcaaatgctaaatgtctaagaccggctgcttctggaaaacttttgcgctcaggcggatttggaaatgaaaataattcgatttgatactcttctcctacacataaatctaatttataagaatctcgttcctttctatatacttcattcatttctttaaaccctaatattctagtataaaaatcctttgacgtctcataattcgaacaaataattgcaacgtgatgcactctacatatattcatactctctctattcctttctttaccaaagatgcatattctcccttgaaatgaaaaacatatatagcagaatatctcttttagggggcttaccacatgcccatcaacttaaggatagaaactctacggttttccattaattgaaatgaacaaacttttaaacagtataatcaggatcaaactctccaataaagttagtttgtctagcatctaaaataaaaattgacgtttcacgttgtttgtttcgttcagttttcaaagaactacttggtcgctcatttgcgacttccttatgttaacattttcatctttcaatgtcaactaagttttttatttcgtttgtcgcttgcgacgttattgtcatcggcgacttgttctatattacacctctaaagtataatcgtcaacacctttttataaagaacttcaatttaatatttttatgctcttttagctagatacgtctctataggatttcattatcggagcacggcttctgcttctctttgatttatttttccaaatatattcaagttaatttgaactctagacttaacttgtgtggacgttttcctccaacaaaactagcaaccttattttaacaaatactagtatataattagagagttgttgtactatcaataaaactctattagaaacaggtgaagatatgaaagatatacgtatccttatagcagacgacgataaagaaatccgaaatttattaaaaatatatttagaacgagaattatacatggtagacactgcaatcaacggcgaagaagccttgcatttatttaatcaaaataaatataacctcgttatattagatcttatgatgcccaaaatagatggaatcgaggtatgtaaaaaacttagagataaaactaacgtacctatattaatgctcacagctaaagatcacgaagttgataaaattttaggcttaagcattggtgctgatgattatattacgaaacctttcagcattcacgaagtaattgcacgagtaaaagctcttatgcggcgttttttagttctcggaagtaacaatactgctcaagaaaaaaccactttatcttttaaaggactaactatcaatttaaatacatacacagttcatacaaacaaagaagaaattagcttaaccggaaaagaattggaactgttaaaattctttacttcaaacccagggcaagtatttacaaaaacacagctcttccgaaatgtgtgggacgataattatatagaagatgacaataccgttatggtacatattcgaaaacttagaaagaaaatagaaattgacccttccaatccaaaattcattcagactatatggggaattggttataagtttgtaggtgaaaagcttgaagactgataaaaccctcttccttatttcattacaacttatcatttgcgggattttaaacatacaaatgggtccaagattaaaaatgtctttatttattatccttatcttaattacaatttatctcttcttttcaagaatacaattcattcaacatcgtaaagcaatggatactaaattaagtcgtgtactaaaaggaaacttacaaacgagattattcacaagcaatgaccactcattacataatatcgttttttcaataaacgagctaatagctaaattagagcaggttcagattgaagccaaaagatccgaggaatccagaaaacaacttttgtctagtatctcccacgatatacgaacaccactcacctccataatcggatatatagatgctttgaaagacggagttgctgcttctgaaatagaaaaacaagaatatcttaaaatactctatatgaaatcaaataacttaaagcacctagttgatgaaatattcaatatggcgaagctagacgctaatgaatttccactaaaagaagaagaactcgacttttctgaagttactagagaagttttgattgaatttttacctgagctctcaaaacataacatcgaactgcaaattctcataccagattctacttgtcctatcatcgcagatcatctaagcattatgcggattatcggtaatttaatgaaaaatgcaatttattacggaaaggatgggaaaacaataggagtcgaactgctagaagctgatgcagaatacaaacttcatatttgggatcaaggccctggtattccaaaacatgatttacaaaacatatttgagcgaatgtaccgaagcgaacaatcaagaaactcttcatttggtggtagcggtctcggactctctatttctaaagcactcgttgaaaaaaatggtgggcatatatgggttgaaagtactccatggaaacgaactacttttggcttttctattccaaaacacaatacttttaagaaatagttaagaaatgattaatatgcagttaagccttcctttttatgatgtaagtaagaacttatagaaagcaggtgtctcctataaatacaattataaaaacgactaaccttactaaagtatatggcaatcaaaaatcagtagataatttaaatattaatgttcaacaaggagagatttatggcttcataggccgcaacggtgctggtaaaacaacaaccattcgtatgctgcttagtcttataaaacctacaagtggaacgattgaaatattcggagagaacttattccaaaatcaaaaagatattttaagcagaattggttctatagttgaagttccaggattttatgaaaacttaactgcaaaagaaaacctactaattaatgcaaagataattggggttcacaaaaagaatgctatcgaagaagcattagaaatagtaggcttgcagcatgagacaaaaaagttagtaggaaagtattctttaggaatgaagcaacgcttaggaattgcacgcgctcttctccattatcctgagctactcatattagatgaaccaactaacggactagaccctattggtattaaagaaatgcgaaaacttattcattctttagctcaagaaagaaatataacaatactcatttctagtcacatattagccgagatagaacagttggtcgatcgtatcggaattattcatgaaggaaagttactagaagaagtttctcttgatacgctgcgcaaagcaaaccgtaagtacatagagtttcaagtgaataatgacgataaagctgtgatgttattagaaaatcatcttcaaatttttgattatgaagtacatgatgaaggaaatattcgtatttactctcattttggacaacaaggatacataaacagaacgtttgttcttaatggtattgaagtattaaaaatgatgataagcgaagatagactagaagattatttcaccaaactagttggaggtggaacaattggttaatctactctatacagaactcttaaaactaaaacgctctaatatgtttttaattagcattattggtgctggtgtcgcacctttcttagttgtagtagcctcttatatacatataaaaacaaaacagcctactccaactatttggttccatcaattattcactgacgttaacttatatactactttagttataggattccccttatatggagtagtggttgcatatttgcttacccgcgaatatgcagaagatacactgaaaaatttactaactatccccgtgtcgcgcattagctttattataagtaaattcatcattctctttctttggattatgatgctaactttagtcgcttgggcacttactttaatattagggctattggggaacttccctggctttaacatttctttacttttaggttctttcctagaatttttaatatgtggtggacttctctttctattgtcttcacctattgtgctactaactcttgtaatgaagagctatgtaccgcccattatattaacagtcattattacaatgactaatcttatgctcgtaaactccaagcataaagatttatttccgtggaccgctactctagatatcgcaaataacgaattacaaccgacatatccaccagagtattcttatatcatcattgcagtaacgacaatttccggatttattgcaacactattctattttaaaaaagtagacattcattaatttgtaggagtgaaactatgagcgatatcattattgccttcatactcggtattgtagaaggattagctgaatttttacctatatcctctactggccatcttatattagtcgggcatttattaggctttgagggagaaagagcgaaaacgtttgaaattgttattcagctaggcgcaattttagccattgcaattttatatcataaacgtctcgtttctttatgtaatattaagccacttctacagaaagaaaaaaaattcaacgcgttccatgtatttcttggcgtatttccggcagtggttgctggtttgctactacatgatattattaaaacatacttattccagccatacactgttgtgattggacttgtagcaggtgcaattcttatgctctttgcagaagtaaaaaagaaggaggcagcagcctattcactggacgatttaacataccgccaagctttaacaatcggattatttcagtgcttagcagtataccctggcttctctagagctggctctactatctctggaggtctattagcaaaagtaaattataagactgcatctgaattctcttttctaatagctcttcctgtaatgattggggctacaggcttagacttactaaaaagttggaagtatttaagtgtcgatgacatccctatgtttgcggtaggattcattacctcttttatagtagcgatgctagcggtagtaacttttctaaagcttttagagaagataggtttaaaaccttttgcgtactatcgtattttgttggctatcttatttacgcttttcgtattgctatagattcatataagtcacatattattaaactgatattcaatttagaatatcagttttttcatctattttaactctagtattactcacttcaatatggcatagtgataataaactaccattcataatctgaacgttctttaagtaactacatcctttatcataaaatgcaattggaaaattaaagatcccatatatgtacagaacatatttacaaactatattcactccacatagtatctttttaatttgcaacacaccgctacaacttttaaatgagtacaaagacatactaaataagtaagtaagtaaatttcctaggaattataaagagactaaatatgaattagagtgaggtaacgataaaaatgaatcaattagcacagacatattgggatacttattggggaaacaacaaaaaaccagaatctgttacagcttggcaatttggggatgcccctaattatcttgcacaactagtaattgacggtattaaaaccgctacatgctccggtcacattttttatgaattagaacatgaatcactaccgactactattgattatagtattatactcaatagtaatgatgaacctgtagctattattaagacaatagaagtaactgtaacaccaatgaatgaagtaagcgaagaattcgctatcgctgaaggcgaaggagatcgtacttataattactggagagacacccatgttcgtttttttacaaaggaactaaatgagcttggtcttaatttctctgaagatatgttactcgtctgtgagcgttttgaacttgttgatgtgaacaataaagtgaaattttaataaactgagatttaccagccattcttatttttataaaacacaaaaaagacgagtcattctgactcgtcttaaagttgcttggcgacgtcctactctcacagggacaaggtcccaactaccatcggcgctagagagcttaacttccgtgttcggtatgggaacgggtgtgacctctctgccatcatatttggcacgcccttttttagaaaaacaccccctatttatataaaaaactccccttgacttctcatagttggtctttcaatagtgttcatattattctatgttttaataaaaaaatggcttgtttattaacctactattttatctttatatgatagagtgtcttctactcgatatagaattcatacaaactatgctaatttttaagagaaagtggagagaactactactagttatggtatttttcaataaacacttgttgaagaaaatgttctaattacaaataatatcttattttcgagtacgctttttaaatgtatatttcacaatgaaaaatgggaaatccacaaataaagtctatgtatatgtgagttaatgggaaaatctagtgtgtttttaaggggcgtcttatttaaaagaaaaaaggtttgttttagaaagtggtgtctaaacattaaatggagtaggactaaattcacggccgctcattaaaaagcttttaattaggagaagtctgtttttataatgaataatgaaaagaaagtttggtacaattgtttgtttttttctttttatgtgtttgcctcgtacccttttaagctagtggacatactttactaatagaaaggattagggggtgaggtattgggttctcgatttaataattgtaaaaagaagtgtacatgtaaacaagatgattgttgggaagtattcgaagagtgtaaaaaagaacagcatgagaaatgtgataattcttgtgtacaaggaattagagatgaacttaagaaattaattaatcgaacagttcaaattaatacagagggacgtacttatgtaggtactgtttcgtctgtaagttgtgatgtagttaggcttgcggctattcctggatcggttggagtaattatttccatttgcaaaattgaagcaattttcccaccggttacaacggttactgctgactttgattttaatggtattgatgtagcaaacaaagcataattatgctgcttttttgtaaagccattcacatgaatggctttattttaattttatataaaaggagaatatattctttatatagaaataagtttgaggttataaagcatgatgtacgaaaggagcaaggaagtgattaaactagaaagctttaagaaatctgattttaaacaattaataaattggattaattccgaagaatttctaatacaatggtcaggaaatgcattcacatttcctttagacgaacagcaattagagaagtatatagaaagtgcaaatacactcgctttcaaagtggtagatgaagagacttcagacgttattggacatatttcgcttgggcaaatagataatattaataagtccgctagaattggaaaagtattagttggtaatacgaagatgagaggacgttctataggaaaacatatgatgaaagcagtacttcatattgcttttgacgaattaaaactacatagagtaactcttggtgtgtatgattttaatacatcggccatttcatgttacgaaaaaatagggtttgtaaaagaaggcttattaagagagtcaaaaagagtaggagaaacgtattggaatttatgggaaatgagtatgttagaatatgaatggaagaagtagcaacgatagtgatttataattatattatgttaacaaaggggtttggtgagtatagtggataataaaacaaaaataatttcaattgcagctgtttcggggggaggtaaaactacaattacagaaagattaaagcataagtttaaaaactcaaaagctctatattttgatagttacacatttgataaatctcctgctgatatttgtaaatggattgatgatggggcgaattacgacgagtgggtattaacaccattaattcatgatattgagcaacttatacaaaataataccttagactatattattgtagattatccttttgcatacttaaatagtgagatgcaaaaattcattgatgtaactatatttattgatacgcctttagatattgcgatggctagaaggattttgcgagattttaaggaaggtacaatagatgaaatacataatgatttggaacattacatgacatatgcgagaaaagcttatttagaggcaattcatactgttaagccgaattcagatatcatattggatggttctttatctgtaagtgaaataattaatcacgctgtagaggaacttggccgaagagaagtgattgtcaatggttaaatgtataacagatgctgttaggtggataattgaagtaagggagagataaatgtgtacactttatttcaatataattggcaagtaagagatgattggtttaagtggtgtgaacaactttcagaggaagatttactttgcaaactgggggcatgttagaaacattatttcatattgtagatgtagagtatagttggattagtgctcttcaaggataagaagatagagaacagcaatttaaagattatcaatcgattcaaaaagtgaaagcgttatttaatttatataaacgagaacttgaagtttttttgcagtcataattatctagcctagaatgctagcacacttaaaataagccgtataaaaagttaatcattgtgtgctttgattatataatgtcggcgaaataaatagtgtgaaggacagctatcttaacaagtgtttcatgtaacgttcatatactttaatttttataattaattaaatttgaattttgtttgttgttaagaaaaggtgagaagaaaataaaaaaagagggctaatgccctctttttcttttaatttggtaattaatcacagattggtatcccaagcactcttagagctaatgctacttgaagggaaatctctaatctagcaatttcaataccagctactgaaagaactagaaaaggttgtccgtttacaaatacaacgcaactatccatagttaaacctcctttctagtaatttactatagtatatgagtagaactttaaaatgtaatagttcaattgttggatttaatagaattaatagattaacccatttaaactaaacaaacgaacacaacgaaaggaaacagagatggatgtatgcctcaaaaaacataggttttaagacatgtaatgggatatgaaattcatcatattggtcagctgtctgtatgggcgaggaagttaaacttgcaaccagtttcagcaaatttgaagaggatgatagaattaaaaaccgacttgcatcttaagcgcaagtcggttttatatatataagaagatttcttaattgaaatcctcggattttttctgacgtatatgtaaaaacattaaggtggtaatgattaaaaaaatcattatagtttgtataattaaattttaaaactgaagcaatattgtccaagatgtaagggcgtctttaaaagcttggagtgcagagtacgaggaaggatcaaaaccatactgtagcaacttttttgtttcaataaatgaaatgttttcttcatctgcatctaatattactgaaattagtctagtatctccaagttttgctgtactgacaaaactataattaccgttagttgaaaaactagtttgtaagccatcaacaccttgaagtttaatgttttcattaagggaatatatcattttattcgtattgaaaacctgggaatctttgaaggtaaattggtaagaggttagtttcgtaatattcaatacatctggaaaatcttttactaattttgctgctagtttagctgcgtctatcgctgttgtagttgattgtttatctgtatcattattaattccagtagagtttagaaatggagatggttgtaataactttagttcttttgcttttttattcattaatactgtaaagttatcttcatttccagcaatgtgttctgctagagcgagtgcagaacgattattccctgccagtagcaatgcatgaagtaaatcacgaaccgttgttttatcattcgatgttacttgtatagggcttgtttctactcggaaaacttcgttacttatttgtactaagtcatctaactgtatctttctatcatttagttgctccaatacgatatattctgtcattaatttagataaagcagctgattgtactggagtttcttcattttttttataaacaatttcacctgaattagcatttattaaaatagctgatttagcttgaataatcggaccatttacataaaggtaaaaatataaaacgataagtgcagtaatgaaaaaagataataataaaatagcgaatttttttaagaattgcataagcgatcctcctattatgacatcaatactagtattgtaaaaaggaatgcttaattaggaagaaagaaaaggtaaagaatttctaaagaattataaaggattattaaattttgggcattaatggaaaaagttcaatttcttatatgataagaaattgaactttttatttataatattaacatttgtatgggagtagttttacagtgaatgttgttttttcatcatcactatatacttcaattgttcctttatgcaattcgactatactttttgcaatagctaatccaagtccagatccaccagtgtttgtagagcgagatttctcaacgcgataaaaacgttcaaaaatatgaggtaaatccgtactaggaataggttgtccgtaatttgttatatcaattgtaatcatattattgctttcataagcagtaaggtcaatatagcgaccttcgcttccataagcgatagcgtttataataagattttcaaacacacgcactaatttttcaccatcagctaataccatgagcttttgagatgggaaagaaggtcgacattctatatttgcttcttgaaattgtatacggaattgaacagttaattgtccaagtaactctactatgtcaataggaacagaatacaagcttaactctttattttgaacacgtgtatattcgaacaagtcattcattaatgcattaagacgagttactttatcgtaaatgacttgaatatagtatcgcaattctacttcatctctataattatcatgatggattaaatttacgtatccaactatagaagtaaggggagtgcgtaagtcatgtgatacatttgtaataagttcactttttgcttgttccgcttgtctttcttcatcaatggagacttttaattgttcaacaatttcattgaccccgattgctaattcttctagataattatgatttacaatagaaactttatgattgaagtttccatttgcaatataacgaatttcttctatcatttttttaatacaagtttcatagtaaagttttttctcgtggcgataaaaaatgtaaagataggatgaaaaaatagaaaataaaaacaaataagatacaatcatcatccataacgattctttaatccctttatacttttcataaccaaaaattcgaatgaattctttaccgagttcagttagagtaagtgaactctcaattacactcgtaacgaggcgataaataattaattcagtaataggcgtgagtgtgatagctaataagagccaaaaaataagtttccatttagggatatcttttaatatatcaaatgcttcatttctcaattttatagccaactccccatgcccatcaacttaaggatagaaactctacggttttccattaattgaaatgaacaaacttttaaacagtataaatttggcacgcccttttttagaaaaacaccccctatttatataaaaaactccccttgacttctcatagttggtctttcataattaagtttgtcattttctgcaaactactgaattataaaactactaaatatatttttccttgtaatcaatttttacattacacatattattacaatctattttttatacaattccctgtccttctcttctgtttgaataacatcaataaaaagtggatatgtaaaaatcttttgattattgctatagaccacatattcgtatttgccactctccataactggaaatcttatttctattacgccatcaataccaggagtcattctgttatctcgaagattttttaattttggtagttgaccactataaacaatttcctcgttagaattatatacaaggattttgttattaatttcctccaatccatcttcttcagaaaattgaaatttgaataaaactgatgtaataacagaagccggaagtataggaacagtaattttatttagaatattataagcagtatgctttttttcttttggatcaaacattatattttctgctattaaaatttgacatgaaatattattcttcatacttttctctccttattcatacaaattaacgaaaagtaagcgctatcatttttgggtaattttttactatctttctgataatgtacatattcatactttttaaaataacctatactgcttttcacatctgtactatcaattaccatatgatttctccagtgcttaacttttcttttgtatagccaaatcggtgctgttaatataacaacatatttttcatcaattgtttctagaagtttatcgatattcttaaaataataattatcatagctcagaaaaagaatatgatattcctccatctcgggtatgtgcaaactatcaattaaattatctatttcatatttttcttgcacatgtagtcgtttgttataataatgtgcataaacaataagtacacatgctattaaaccactaattactaacatcagatttatagccatagtttaatctttccctatcataattttttaaagatatgagattgtacaatagcacagtatatacactaagtagccctaagaataaacttatttctaatgttcgaaaagagaaaggtaacaatacttttattattaataatattacgatgattgaatttcttgcaattggagacttattcataaactgcatcttaccaaaacagctacaacttgttttctctaacttatataaatgtttttttctgataattaacaatataaaaccaatcattaaagcaatagtacctatttccttatatggataatatatatttaatacaaacgtgataaaaatgcacaattctaaaattagtaccatataactaaaaaatagtatagattttaatggtaaaatattatataaaattaaatcacattttaaaccatggatagaataacttttcatgtagaaagatgcaaaaaatataaatgctatactcaagtcgatacacgacgatagaatattaatttgactcaccttctaggatagaaagaagttcaactgcattttctatatcatcaattactctcatagcagttatcctgttattttcatctattagacaaaaacttggcgtttcctgaaagccaccttcatcaatcaattcatcaccaaaggagattatattaaattcaaacccaaagtaatcttttatctcatcaatatcttcaatagatccatcagttactaatacaaactctcctttatatgaatttgctatctctgatattttcgggagtagatcaatacatttcatacagcttaaagaaattgcccctagtagccaaggactcttatttgaaatattcattaaatttttaggtaatattttacccactgttaaataatttgtattagattgaggtggcactctatgtttttgaaacatttctttaaacccttttatcattctggagtcctccttaatattctataatacatttaaatttagttataatgtcttcaaacatattatcttgatagcctatttctgcatataatacttgtcctagttcattgacaaaatacgttctagggacaccactaactttaaattctttcttcatcttatctttattacataaagatactaaagctctaccttcaaatgtggatttgatatattcaaagttttctgggcttgtatcgattaaaataagaacatttaatgatgaatctttagttaaaaatttatcgagcgcttccatggaaggtaagcatccttcacatgacgtactataaaatagaattaagagatgttttttcaaaatatcatgtaatttgcacgtattcattgtatctatataaacattttctatatattctcctacatctaaacttttaggaaacctaaaaaatttcctatgcccttctagaattgaatccatagtatcctccttgttttttatttttcatacaattattaagcccttaaatttctgctcttttctacaataatccttaaaatttttatcatatctaactaagaaaaactttaacatacatttcttttaattggaatatttgtaaaattttataaagtttttatggaatattcagggaattaatctatttttaaagctatacatttttaatagctgatactgaatatcttctggttaattctggttttactaagaaaaacaatttaaataataatttccaaataataacactaaaaaaagaatgcctttctatttaaagaaaatggcattcttttttaatttttgctaagaatataaatctattatctattattttctcaagatatatctcattacaaaaatactatatagtagatcaaaatcatactcgcataatatgaatcatcaatacaataaaattcatcatagcatgtactatataagaaactaataattgttttgattgtttatatacaaaggccaatacacaaccaataaaaaaataaccaaatataaatgggaagtcaaaatgcattattgcaaaaaacaatgcactgattacaatactccctacctctttaaatttcttcattaaaatattcatagtagcatatcggaataccagttcctctaccaatggggcaagaattacaattgatataattgcaataggtgaaattgatgcagctgcaactatactagatgtgttttctgattgcgtagaaatttggaataaacttttatctaaaaaactaccaattatctgtgcaaggaaaactaaaacaattccaactagaatccatccacatgcggtttttgataatttaattgatagtatagatttataaatatgtttttctttatatatagtaaaagtgataattaatataagcagaaacccaattagctcccaatgtaccaaaatttgttgaatcgcttgttcttgattctcatgaatatcataccaacctgtcttagctaataactgcacacctattattcctacaaattgattcataataaaataaataagaatgacataggccgatttatgtatattagtagtattcatattattatattcatcacccttcttctttagacatttaccatcatctacaaatcctattctgaatttttaaaattataaaaacataaaaacatcatattttttattacacttcggaaaggtttctttacgctaaagtaattctttccttcataggaattatctcacaatctacttttactaattttccactaacaaatatctattacccaaacaaaaacaaaacttctttaaattttataaagggttgtgctttacatccacaaccctcgcttttctcttaatccacaggcacttcttcttgaccatgtggaatttgtgcaattggtgttacaatttgtgcatatttgtttacctgcactttaaattgtcgtggttctaaaaagtttacctgttgaattaaaacttcaatatgaaacgtatctacttttttcccacgttcaattttggtaattcgtgcattgtaaaacttatccccatttaggaaatatcgttgaacagcttctgtagcaagcatacgttcattacttgtcattttcattggttcaataccaaatccagcctttgtaaacaaatacgggacatcataactactattagaaatttttcgtagtaaatcctctacagcttttgtctttgcgatatattcctcttcttttgtatcaaatccctttggcttatctccaagcatctcaatttcatcttgatttacttgctcttcctcttgtacttgagatttcatcatgtaacgatgaatagtattataggtagtaacacctaccactagtacaataattcctaatatgaccaagtacttacgaggcatattggataaaatgttgattattttcttcatctactctcatcccttatcagtctataacattacggatttgcgtcatatgttgtcctcttgccgtatagtttagacctgtaatttgtacacccttattatcaccaatatgaatcattttctgatttcctaaataaatagatacatggttaggattttcatagaaaattaaatctcctggttgtgcacgaccgatatctggcacctgttttccttgtccaatttgagcacctgtccaatctcctagctgaacacctatactggttttaaacacatattgtgtaaatccagaacaatctgcactacctgcagctggatttctagcaccggacacatagctcactttcccttgcccaagccatttttttgcttcttctaataccttttgtcgtttagcatttgtcattgtaggagcaccacctgatgataaccctggatcatcatttttcttaaagaatttcattggatccgttggttggtcattaatacgaatttggaaatctaaatggacagcgtatccaaacatattaagaacaccaccaacatagttagccccccccatttccccaataatctgtccttttgttaccatagttcctggtgcaactaagattttacttaaatgtaagtaacgggatacaacgccatttccatggtcaacatagactcctaaaccaccgttgtttacatttcctgttttatccgtaaccataccagcttccatcgaccatacggggtctcctggttttccggcggtcatggccccaatatctacagcattatgcggtttgctagcatgaatttcatcaaatgtacctgtaatacgccctgatttcgttggccatttccaacctttatcagaaatccattctccagatacatccgccacgcatcctaaatctttgtaatatttcaaaactttagaaacgtacgtgtagagtaaacatccagcgccttattacattcctgtgataggtttccaaatgttcctccccgaaccggacttacagtgcgcccataagggtagatttagaattgattaaatagcactaatctaggttaactcacgaaagacctattaccaatcacctcacctagaagggaaacctaaaggggaaaacagcatggtgataaagtcataagttggtcaactactaagatcacgactgaatggcaaggtaaaactcataaataaggatgaaggctacactgcttgaatgatagaccaagggtggtcagcgatacgagtaatgaaaggtagttgatacattactagggaacaaggttataaagaggatagtttaggtcgtacatataaactatcagtgagtctctccctcccagccacagtaagtggaaaaaggtcaaacgtcacatccgacattatgaaagctattctttatctatctaaatggggattgcctaagttgggatgccaccggcatacttgcgaatttggctatgaagaatgacaccaagttactaacaaggtgtgtgacttctgaatacccaataaggcaacggagccttcatagtagtccgagctagggaaagcctagtacatggcgaaggaaggcaacttatccggtctaaaacaaaattggaaggtgtgtgagacacaatgagaaatccaaatgcagtattagacaatctgaataaaaaaacaactaacccagcttataaatttgaacgtctgtatcgaaatctatataaccaggagttctactttgcagcatatcaaaaaatatatgcaaaagaagggaacatgactagaggaacagatgggcataccattgatggtatgagtttggaacgtatcgataaaattattgaaagaattaaaaaccaaagttatcaaccagctccatctcgcagagtatatatcaataaggggcaaaataggggaaagaggcctttagggataccctctatagatgataaattagttcaagaaatcgtaagaaacatcctagaagctgttttcgaaccgaccttttctaacaattctcatggatttagacgtaatcgcagttgtcatacagcactaacacaagcaactaaaatcttcaaaggagttaagtggtgggtagaaggtgatatcaaaggcttcttcgacaatattgaccatcacattttgattaaactgctaaaaagaaaaattaaagatgaaaaattcattaatttaatctggaaatttcttagagcgggttatttagaagattggaaattcaataatacttatagtggcactccacagggaggaataatcagcccaattctatcaaatatttatctaaatgaacttgataagtatatcgaagagtataaaacactatttgataaaggcacacgccgacaaaacaacatagtatatacccaaaaatataagcgactttggtatttaaaaaagaaattcgcagatagaaaagtactggctccacacaatgaattaactgagattacaagtgaagtgaaaaggcttcaaaaagatatacgtacaatgagttcagtagaattaatggattctagctttaagagaattcaatatgtacgatatgccgacgatttcctaatagggataattggttcaaaacaggacgcagaagaagtaaagaaagaccttacggcttttctaaagaataaactaaatcttgaactatcatcagagaaaacactcattacacacggcaaaatgaaagcgagattccttggatacgatgtaactataagtaaccttcaggctgtatacaaaggctcaaacagtagaatagccaaaaggtatgcatcaaacaagtgcgaaatttacatgcctaaggaaaaatggattggaaaacttaaggagctcaaagttcttaaaatcgaaaaagatagtagttggaagtctattcatagggccgaattaataaactccgacaatttagaaattctaagtatatacaatagtgaaattagaggtttatataattattataaactagcaaaaaatgtacacagcctacagaagtttcgctacattatgaaattcagcatggtaaaaacttttgcaaacaaatacaaactatcagtcagcaaaataatgaaaaagtttaatcatgaaggcaattttagaatttcttacacgactaaaactggtcagaagcatagatatttctataatgaacctttgaaaagagtttatgaaaatccaactactaataaagaaatagatatcgttccaaatactatgatatatgcaggacgcaatagtctaatcagacgccttcaggctagtaaatgtgagtggtgtcaaactgaaaacaccgctatcgaaatgcatcatgttaaaaaactcaaagaactaaaaggaaaacaactttgggaaagaatcatgatagctcgcaaccgcaaaacactagcattgtgtaaaaagtgtcatgttgacctgcacgctggaaggttagattgaaattcagaggataagtggagagccgtatacatggaaacatgtacgtacggttcggaggggagcgtttgaaaacctatcacagtaatgtgaaaaggcgttgggcgcttaccctacgacgatgtagaacgtgttcaccgtatgcataaactattaaaggtacaggtcgaaaagttatatgattttgttcaaaccggagctgcttcacgtgaccaaaaaaacgaatataagattataaaaggaattgacgagtggtttggtgcgacacgtttctctataaatagttaataactatgaaatgagaagactatctagattaacacagatagtaataactgatttaacgagtgagtggaatgaaagccttcatgttgagctgaaacactcccaataatactcctacatgcagagaaagttgatagactgcactgtatgaagctaggtaaagacgcatgaagaaagtctaagtacatgacaacatgtatatggcaattgataatgcggttggctataaactaatcatggtgagaatgaccaactggtctgacgaagatacgaatgtacgggtctaaaattcgaatacagtgaaaactgtatcccttgtatggggtaagtcaacgaaaagtaagaatcgaacctatgaaattcgtactatgtaacaatgaacatagagaacttacaggcctatagtatccacctaaaattagatgtacagctagttaaatcggaacgtgggaagcgagagacaactatttaaaccactatcttggggttggttcatataaggtataaagccgaaattgatttactctcgtgaaagcaggggtacagtaccgatgaaattatggaaacatagtggagggataaccccgagtcattaaagaaattaagcaatagtaaccaaatgaagttcataaggtcgagtatgatgatgggactttccaaaaggaaggagcaatatatccatcgatgaacgctacactgagaaacagcgagtactacggtatgcaatccacctttgacacgctatatgagcgcagtaaatataactgcacaaaaggaataggattatatgaaattataacatcaaaagaaaatatactactcgcataccgcaatatcaaagccaatacaggctcaaagacaaaaggtacagatggaataaccatagataattacaaaatgaaaaatgtagaaaacttcataaaggacattagaacagctttaaatgattataaacctcaaaaagtaagaagggtagcgatacctaaagaaaacggtaaaacaaggcctttaggtattcctacaatgagagacagactaatccaacaaatgtttaaacaagttctcgaaccaatatgtgaagcaaaattctacaatcattcctatggatttagacctaatcgagcgacaaaacatgcaatagctagatgtcaatctcttataaataaagggaataaacatcatatagtagatgtagatataaaaggattctttgacaatgtaaatcacaccaagctaataaaacagctatacaacattggaataaaagataacagggtgctaagcattatttcaaagatgcttaaatcaccgatagaaggcgtaggtataccttcaaaaggaacaccgcaaggtggtattttatcaccactactatcaaacgttgtactgaatgatctagactggtggatctcgaaccaatgggaaaacatgaatacgaaacacaagtacacaagccttcacaaatatagagcactgaagtctaccaagctaaaagaaatgtttatcgtacgatatgcagatgactttaaaatctttacagattctcacgaatctgcaaagaagatattccatgcagtcaaagaataccttgaaaatcacctacagcttaatatatcaagagaaaagtcaaagataacaaatattacaaagggtaaatcagaatttctaggattcaacttaaaagcagttaaaaagaagaataaatttgttgctaatactcatgtttcaagtaaacaaataaaaactattttagctaaaaccaaaaagttaatcaaagaaattcaacataaaccaactgtaatatctgtcaacaaatataatcaatatatattaggaattaaaaactactaccgaacagctacgcatgtaaattataattttcgcctaatagcctatcgtctatcacgaaccttatataatcgacttaaaaaccatgtatttgaaaaaccaataaacccttcggttttatataaacgacttcataaaaacaactataaaacatacaaaataatgggagtctatttatacccaatagcagatattcgaactgaaaatgcaatgaatttcagtcaaaacatctgtaattacaccacggagggaagaaaaaatcacaagagaattaaacaaagtgtagaacacgaaatcaataaaatgatgttcacacaaagaaatgacaacttggagtacgaggataatcgaatctctaggtactctatgcagttagggaaatgctcaattttaggaacattcctagaagctgaagaggtacattgtcatcatgtaacccccagaaaattaggaggaaaagatgattttaaaaaccttgtgattgttcataaattagttcatacacttatacatgctacaaagaaagagacgattgttaaatataaaaacttacttcaattggatggaaaacaattgagaaaactcaatatgtttcgtcagaaatgtaatttggatattattgattagttaatttaatgatggaacgccgtatgcggtgaaaatcgcacgtacggtgtggagcaggggaaaaggtggagattgcctcaaaaccttacctattgctatataatacctgtgaatccaccaacaacgaatcttaaaattggtaagacgatatggcgagatattagtaacggtaaacctggtgttctaaaagtgtggaacggtaaaggttgggagcttcttattcctgatgtggaatcaattaaaaaagatacactagagcaggttaataaggatattcaacttacaaaagaagaattaaataagaaagtggaagaagcgcaaaatgaaactgctggtcaattcaaggaagtaacagaaaaccttcaagaagtttctttaactattaaaaatgtacaaaactctcaaggtgaaattgacaaaactgtctctgaaatgaaacaaaccaacgaaggttttactaaatctattgactcgttaacgaaaaaaaacggtgagatcactgagaaattaaatacagtagtagagacttccgatggcacaataaagaaaatctctgaggtacagaaaacaacaaatgatctaaagaaaacaactactgaaatagaagaaaaagctggggaaatcatcgaaaagttaactagtgtagaaaagaaagttgataatacggaaattggtatccgaaatctattactagaaacagctactaaatcccattcagtgaagactggagaaaataagcctcatacctattttggtgtagctaaggatgcggttactttaattcagggcaagaatattgctatgagttttttatttacaggtaaggttactgcatggggtacaacgaataaatgggttggtttcgaagtgaaaattacttttacagacaatacatttgcttatcctagctgccgtgtagaaaaccgtctaacactaggtaaacagtataaacaggaaagatttacagcgagtgctgtagtaatggataagcctattaaagagattttagtttacgctttaggacgtgatttcacaggagacgtgttaattgaaaagcctaaattagaagttggcacagtacctaccgcatggacaccggcaccagaagaccaagtaacgaatgaggaattcaacaagaaaacaaccgagattgagaaaagtgtggatggaatcaaagaaagtatcaaaacggtagaaaaaacacaagttgattttagcgagcgtgttactactgtagagaaaacagcagatggtattaaagaaaatgttactagtatacaagaaatacaaaccaaacaaggtacgcaattacaagaagctaaagcgggttgggaaactactgcaaaagctctggaaggaaaagtagaaataaaagatgttgagaattatgtaggtggtttaggtactgtaaacgagttgcgtgatgctgattttaagttaggacagaaatattggttttggaatagtggtaatggagcaactggatctgttgatacgaatttaaaatacaaaggtatgagtacattcgcaattaccgttactggccagactcaagatcgttggtggggacttacaagtcaattcattgagtgtcaggttaacgaagactttgttgcatcaggctatttcaatactgatgggaaaacacctattgatagtggcggtgcatttattgaaattgaatggtggactgctgacaaaaaaactcgcattaaaacagctagaacgaatatcaaggttgtaaatcatacatggattcgtgctgtatgtacagataaagcgccagccaatgcagcgtttgtgagatggcgttattacgttacaagaaatgggcgtttatggtgtgccgcaccaatgttacaacgtggcactatagctacagaattttggttacatccgaaagatcaaacggatgctgacaaaatgatagaagatattgctaatagggtagcaactaaagattacgataaaaaagtaaccgaattagaaagaagtatcgctactaatgaagaaggcgttactatcatttccaaaaaacaggaaagttttattaatgagacctataatgcctatgtaaagaaaacagaatcgaagttacaggtattagatgaagggatcttagcacaaattttaaaagacggtattattacttctattaatatgtcacctggtaagattacaatcgatgctgagaaactgaatattaatgctgatacaatggtgaaatggttaactgcaaaaggcattgatacgaatcttattagaattgatggtgataagataaccattgataaagatggtgtaactgttaaaatgctagacttcctattccaagacgaatggggcacaaaaacaactgcagtatcaagacgaaacctaatagcagatcccgacttttctagtgttacaaagaaaaacattggacataacgattattatggatttgaaggtggatacggtcttacttggaagtcctggggaaatgtcgtaatagaaaagaatacacatatatttgattacgagcaaatggtgaatgccgcaagggtagatatgtataactatccagaagcaatcgtgaataacggtatacatcctggtaacgaatatacagcatcagctcattttagaactgctatgataaatggcgtgcgtaagacaggaaaaccgagaatacacgtatgctgcgttaaattccgagacaacgtaagttacgacatattgagtgaacaaaagatggactttcctgagccgtctacattctacggagaaatcagaaggtattcttttactttcaaagtgccaacaaactatattccgcaacaacatgcattgattattaaagtttgttctgctaatgctgacatgagacaagggacagcgatttgtgtaagtggtgtaacgctatacagtggcaaatatgcatctatgtataattgggatcgtgctgcagcagaaagagcagatggtattcagccgtttaacgcacttgctgtaggtggtgtgaataataatatatctccagcaccagacggacaaacgtttgatataagtactgaaaaagaagttaaaatctttaggaatatacgagcaatgcagggaattaacttaggtggcggtggattccaacagtggggtcatattcgttttacagacggtaatgctggaccgggtttttatgcgagtactccaagtggttggaaatttaacgcacttggatagaaaggaaggattaaacatggatattaactatatgatgccttttcaagaaggtgaaacgcttccttatatgggaagaatagtagacgtaaaacgaacggaaacaggagtctttatacaagtacctgctgacatgttagataatgcaggggtttccaatgatacgagtaaagttgaggtgtggcgggacatgtctgacggaactattggttttagggttttaacgaaatgtgagttatgtggttgtggagccaaattatatgaattgaacttaggagttgttaaacggaacatttgtgcaaatgattattttaaacttacaggtgaatatcctccacaagaaccgccaacaccaactaatgaaaataacacagaaacagagcaggagcagcaatagctggtctttttttattgcctaaaaaggaggggaattatgacagttgaaattggattaattatcgcaatcgcatcagcattaattgggtatttttcttattcgctgaaccgctcaaaagaaattaaatcagatggtcagcaaggggcagaattgaaagcgaaattagaatacatcagtaaaggtgttgacgatattcgcatagatcaaaaggcaagtgaaaaacaaatgattttatttggagaaagaattacaagagtagaggaaagttctaaacaagcacataaacgtattgataccttagaaaaggagataaattaattatgacaaaagagaatataaaaaaacgattccgcaactggaaaacatgggttgcggttttttctttgcttggatttttatttacgaaatttggtgtaccagaagctaaaagctttttggatgaattagcaccatatttgttgacagttggtatcgcattgggaatttggtctgatcatgatgtaaacagcgaaggagaggataaataatgggttacactgtagatatttcaaaatggaatggagatattaattggcccgtggcaaaacaatacattgattttatcatcgctcgtgtacaagatggttcaaattatgtagatcctctatataaaggatatgtacaagctatgaagcagcataaaattccttttggtaactatgcgttttgtcgttttgtttctgaaaatgatgcacgtatagaagctcgagacttttggaaccgcggagacaagagcgcaacggtctgggttgctgatgtagaagtaaaaacaatggatgatatgagagcaggaacacaagcttttatcgatgaactacgccgattaggtgctcaaaaagttggtttatatgttggccatcatatgtattttccatttggtatggcgaatgtgaaagctgactttgtgtggattccacgttatggagggaagaaaccggattatccatgcgatatatggcaatacactgaaacaggtaatgtacctggtattggaaagtgtgatttaaatgaattaattggaagcaaatcgttagattggtttacaaataaatcgtataaacaagaaggagtggagattatcgtgaacaaacataataaggtgattacttatgaatttggtgtaaatttaattccagaaatgattcaaatgatggatacgcttggatacacttctaaaattgtgtctcgtggagatcgtcaagggcttgtatattttgaaacggattatcgtcaaggaaatgaattagataaagtaactgcgtggttagatgcaaaaggccttaagtatttttatacaaaagaatagttttacgaacagaaataagagccgtcctgtcgggcggctcttatttaatttatattcactaattcatcaaacttaaattctgtgttgagaccaaatgcatccgtacaatatacgatttttaacattggttcgatgtgtagcacatttatgtacatgtcctgtatcatgccatcgcgatagtaagaaattgatatttcttcatgagtttgcatggatcgaataagactatgttgaatttgctctttcatatcttcagaaactattggtttcggtactttatttaagtcattaagtatttctctaattcctgcaaactgttccggcatactggcaaatggttgccacttcaccattttatcaagactttttttcgattattgtagcgatattaatgcctctatcgttgtatacatatcttcatacataattctttgctctattgtgtatacttctttcttttttgctgcggcattgataccctcttcatttatagtgaaacggttgtcgaccatagtcattttctgattaaattgttccgttgcaagtttattagctagttcgcccagcaaatcttgtttatttttatcgactgtttgcttcaactcaggtatcttaaatccagcaacataattctctacttgtttaagctcaacttttgcaccgattgctgttgcctgttgttcaatttttgtatttgcatcagtaagctttttcccttgatctgatactacattatttaaattgcccactgtggaagataatccagttgctgtttgctccactgtagtcatgcgcttttcgaatccatcttgactattcttcaccttagatacagtatttgttacaccatccacacttttttcaatctcggttgtttttttagtgaattcatcattcgttacttgattttctggagctggtgtccaatcctgtggcttattacctttatataaagctacccattctacaatggcttttgtagtgttacttggaaagttatataggctcaacttcctttcatttccactcgttactgctacagctttaaaagttacataggtaactccattcgcataaacacttgttgcatatccaacattactagacccaccattcatccaaataccaaacttttgacttgcaggtacactccctttaattacaaaagtatattcttcacctgcaacaaaattttcagttagcgaaaatacattgattaaataatccgttttttcgtatttagcatttgaatctaataacagattacgtccaccggctttatcgctattaacctttgtttctacagttgttaacttttcactaatctttcctgcttgttctttaacttcagttgtggtcttctttagatcattagttgtttgctccacttcagaaatagtcttctttgtaccttctacagtttgttcgaccgtatttaatttattgctgatatcattatctttttttgttaacgattcaatagatgttttaaacccattagaatcctgttcaaacttagttacttttttatcaatttcaccttgtttattttcgatattagaaattgtacgactgacaccttgtaaaccttcctgtacttcattgaattgtcctgtagcttgattctgtgcttcttgtaccttttggtttaattctgcttttgtggactcaatatttttattaacctgctcaagtgtttcttttttaacggattcaacatctggcacaaccgattcccaaactgtacctgtccatatttttaaaatgccgggctttccgttactcatatcacgccaaagcgttttattaggtttaagccctgttgttggtgggttcttagcttctataatttcaacagtattgtttttaatattctcttgtaccttttcagcaagtgttttcgctgcttctgattctttcttagcgctacttgctgtttcattcgcttctttcaccaatttatctagctgatccagcatttcttgtttttcaccgaatttactaaggattcgattgtaaatttttcgtaattcctcgttcggatccgtaatttcacgataatcaccaaacacatatttatcttgtgtaggatccgtaaaagattcatcaccggcaattacacgtgcttccaggtataacttaggtgtgaagcccgtatctttaattcggatcgtatcgccctcgttaatgagttcatgtgctagtccgaaaatacgtccaatcgattgcgcttctacttcatacgaaacggaagaattaacacgtttttttaattctatttccattaacgtcattaaacgttctggcgtcatatttaactcttctgtttctggcgtataaaaaccaaacttatgcttaccacgttcattccatcgttgaaatgcatcattatctacaatataaggaagtcccctgttgatactttcgatggtaattacattgtcgccttcacctttcacaaatccaactaacgctgtacaaatatctcttgaatgttcaatacgtgtaacgcctatcaaatctttcccgagctctatttctttgcctgtgtctcgaccacgtctttgaatcatatcaacataccatccaatgatttgtgatccttgaacctcaacacggtactgaatttctaatttgaataaagaagctattttctttaaaaatgttagtggatcaataaattcatcaatggtcatcgtatggaatcctgcataatccgttttcccacgtttccatttcatgcctactagggccatatcaatatatttgtttaccgtttccccttctattctttgcggttttataatacctgacttagcaatttgaacccaagctcctgaagcatatgtggtaatggatcggttgtctgaattcttttctgtttctctaataacatatggtacaattcttccgtcacgaacttcttttaaaacaagattttgttgttgtagcgtagccgaatgagttgttccatcaaaaacagtaaaatccaacatatcaacattgtttttgatttcccactgccttttatcatcccaatagtcctgcggctgaatagctgcaacgatttgatctgttttaaaatccacaacatgcaaaatgccgcttggtgttctcatctgtatctctccctataacgaacagttgctttaacgtctggtggcatgatatcaatacgattttcaccacgtattacagttggaaaattactgaaaaaatcttttaaattaatggctttttttccgttaatggttacaagacttttttctttatcaattataattttatctcctgtttcaaaaatgtaaggtggattattttgagtatttaaattgactttccaaaatttcaaatctgaaacggtcattgcttctactggtggtacatcttgccattgcataatactaatctggatttgtgctgctttttccatgtgatcgtttttttcatccgtccaccgtgcaaagcgctctgaatcatccttctctgtccctggcaagaattttgaaatatatgcttcccatacatttcccgttctagctatccacaatcgaccaaaatactgattccatgtattcggataatcaccactctcataaattaaacctgttttccctggcttattatcatatccaattaccatcgtcccaaagttttgttcagcttgccaaaacacatcagacatggcaattttggaaagaaccttgctattttcatccaatatcgctatctcaactcggcccatttcattaatttttttactcttacatgtaacatgggcttgcataataaaatcttgtactggacccccaggtatattctttttaacagctgcaccgtgccaccctttccccgcactagtaccaaaatcagaacaataaaattggtatttatctgacttcatttcaccaattggattgccatcttccattgaactgactttactccatcctacagtggtagccatttcgtcccatataagtctttgatttctttcaacgggtaattgctctgttttcaaaggataaccaattctaaagtaatctcgattatatggatactcaccaaaccacacatctaaaaatgtacttggtttctgtgcttcgatttcaataattgcaggtgcttctatattcccttgattgacaaaagaagcagtgacttcagtagaaccattttgagagaacgaatgagtattttgttttcctaatttatatggcattggacaaacaaaagtaataacccctttacctctattaactatttcatccaggtctacagaaccatcaattaatgctagatacgtcctatctaattcatcatcaaaaacaagttcagctggttgctctgtatatagccaatccgctaaatcttcttttaccttttgtaaatcagccatatcttttgctgccttaattacaagaggaacatcaatacgacgttcctccgtttctgtatgaagaaaaagagcccctgcgcgatgagggacccttactaattttcttttaactggagcccaggaagggcgttttcttccaactagcatttgaatataatcttttctgattttattaaaagtaaaaccgagtttccccaacttgctcaccacccttaaaattccgctcttcttttttggtcacgattttgaagctttgtcgtatatgcgtaacttccgttcgctaattcttttccatctaaaacgtttgtcatatttaccgttacattcagttcttgttctctacctgatctatccgagaacatagtttttgctgtaggtgcgttgttataaggtgattgtggttgcgtataaccattgaaatcaccaagtgtatgatgtgggatactataatgcgaggtttggaatccaaaatcaaaaacagatggcatattccccatctgtttcttaaccgttccaactacattttttgctgcatccacaacaaatcgtttccccttatccataccaacgccaacaccttctggaactgcgctaccaactggaatcatcactttagatggactgttaatttctagtgctccagaaatagtctttttaatctctccagcaatgcctttcgccttactatataaaccatctgtcgcatcatccaaacctttttcaagaccttctataatggatttaccaatggaacgtagatttatagtgctgaagaatttttcaactgtattccacttatcttcaatatcgctctttatttctttcattttatcaacgacagcttttttcttttcttcaaatttccttgaaactgtattttttatctcttctaccttgttgcttgcggaagtttttgtttcttcccaccattttgttatacctgaccaagtttctttcatcttttgaacgacatcatctttcattacttgatattttgattttatctgaccagtttcccaatcaacttgatttgcatgttccccagcttgggattttgcttcacccacaatttccttatgcttatctcgtgctgttgaaacagtgctgtcatactgacgtttggcttcggcaattacagccttttaaaataaacattcgtcatttttgtgtatccaatatcactagcgcataagaggaaatcgattactgcatcgttcatattttctttctcaactagcttagctaaacttacaagattctttttctccgtctctaataaaatccctagagatatcatccaaattagatttaaatatccaacttcattttcccctatatgcctcaaatcaataagagcgttgtcaaaatctccttctattgtatggatagcttctcctagggaatattttgcaataatatcctctaactcataattaaagcttgataagtaggttccttctataatactattattatccttagaatatctttgaattccctttttctcaccttcttctaaacttttaatatcctctttattttcttgaataaactctttattatattcaattccttctctacatttttcttctataattaaataatctctcattctatttgattcctcctatagatattatgattatttagataaaaaaaacagtgataattcctaattagttctgcatcaatcttacttctagctcactagatcccttaccaacattacccttatagatactttaacacaaactaaaaaatccacagtgtaaaaagttgaacactgtggattcttacatttattttccttgataatgcaccatatcataagggtagtataaagtattttttaaacttgaatcatctaattttaaaatctttacgattgctccgctttcgtaactccaataaccattgtagatatcatttttattttcatgtgagtcataccagcctgtatcactatgccccttataccatttcccctctaaatattctttcaattcctttactgattcttctttattctttgcattgatcacatgataaattgatttatatgggtctacaaagataaattctgtggtattcccttcccaattttcatctttataactaaataaaaaatcaatcaaataatcattcaatttctctttttctaccaacttttctaattcaattatataatcttttgaaacatcaagcattatcccaatagaaagaacccacaataaatctacatatctatatttgccactccacccctttttcatcgcctcaattatttcggggtaaaaatctcttagtacttccataggtcttcccattgaatataaacaattaaatttatcaatacaaattgattcaatatatccataagctcttttaatactacctaaatcatttgatctttcattttttacttttattgctaattctttatatttttctattctattattctgtctatttaaataatcctcgaaataatcttcattttttaaaatatctctcatttcattctccttactcaattattttcttcccagaagaatccaaaatgtttttaaccacattaccatccttgtcaacattaattagtatattttgtacattttcaggattcaaaagcatttcttctcgaattttatctgccatttcttctccaacagttgattccaaacgtctagaaccatctatccatatttgacatttgtcgtccatctttagttttccccaattgtgaactaccaaactttgcttcatcaataacatatttgatctttgattctgcatttgcattttcgtataatccatcaattccttttactattttatcatttatgcctgatggtgcactttttccgactggctttaaatcaaatccagcttcttttaaactttgattattcaataaattgtcactagattttatttcaccataattacctttttgcttatttgtagctgtttttgcatcaaaattatctacagttgtatttttgttactgctaggtttaccgttagccgcacctccaccagaagactggattttttgaatagtatccttagtattttgaatcgatttatcccaaacaaatccaccatgtacaaaaagacttgccccagtagctgttgctgctatatctaatggaataacaattggtgatgctaatccgccagttcctacttctgcaacgatagttaagaaattagatccgcctatgagcgaaatagcttcaaacatttctacaatggacccggctatttaataatattgtccagctttttctaatgtttctttacattgaaaaacatactatataacatcaattgaagcctatgtgcctgtgaaatgcgaggtacgaaagtgcattcgcttaaataataattttcaatttaaatcaacaaaagagacctcaaatgtgaagtctcttttgttgattattttccataagtaactcgccttttatttgtttattttaagacagataacatggttcattcaaatatatatcctaaagaaaaattttttcctgccgtcataatctagtagaatagattcaattaattcttattaattgcgataaactcactaggaatctcatctgctaaccaagctttttcatttcctaaataaaatttaacgccttcttctctagctttttcagtattaacttctaaaataataggatgcttatcttttcttttccccactaattcagcagttacaatatcttcagaaagatggacatattgtctatacataggtgatagcccatttaattcaatagaatttaaaaagcgaggagatgtaccatgataaagaaatttaggtggaacgccttcttcctttactattttcatgggaatagaatgttcatacaacgcacgaattttattttcttttagctcatgccttttttctcagatttctcaatcattatttttaaatcttctatcttcacatctctccattcaatggattggtgaagtgcgtgtaaaagttgctcaacagacacccagccattctcatctaactccaattcgtattcccacggagcatgacgtaaagcataagatacttattcaattaaatttttaaatgattttgattattgtttttttcacttcgattgtaatctatcatttctttcatagcacattcaacccaatcccaaaagtcatcaaattcttttcttcgttcaaaaccttcacaagtaaaatcatgaataaattgaactttacttcctttgtcgatttcaaaacatgcagtatcatcattatcaaatcttttagcaaaaggaatcagcttacgattaggatatcttttcttcataccagagtatatgttagtagcctgttctgattccattaaaaaccatatatcaaaattaactaaatctaatttgactaataaggtaacagtttaaatgccacctattatttacacatttctctttcccatactctttttccgtcagttaaaaacactgcacttggcggatcatcatagagagaaatttcaaccaatgaacttttttcttgttttaaccaattatatacagtaccttcgtttgtattaggtcgagataaaatattatttactctaaatacagctgcatcatattctgtataatttatatcatcctcatctagtccattgtctgtttcaaaaactgtatctagttctccaataatcctcaatccacttttccattctagtatcatgtcactatgttcataatttattaatgttccaattaaagaatcgtaccccattcgcatcctcttttcttatgatttttatggtctggatggtactatatgagcgccatcaagaccataatgaatcaaccctttagtagtctcatggtattcaccagtattgcggtcataatattttcctattggctcaccaaagtctactctttctctaccgttttttaatagttcaccttttcctgcaaacttatcaagcaattcttgtgctattttattatcgccatagaaaatgctcttattttttccatttgctaattcttgtttatagttcggtgtatcaggaatatgcttctcttgagctcctgctttcacttttattggataaccatttacttcacggtatggacctttaggtacagaatcttttccataagaaggtattcgattactcgcacccttacccccaccagaagactggattttttgaatagtatccttagtattttgaatcgatttattccaaacaaatccaccatgtacaaaaagacttgccccaatagctgttgctgctatatctaatggaataacaattggtgacgctaatccgccagttcctacttctgcgacgatcgttaagaaattagatccgcctatgagcgaaatagcttcaaacatttctacaatggacccggctattgatataacatttccagccaaccttccagcttggtaagttgtcttactttctaatttatcattctcatgtggttgtagtccaaaaaagttttctagtgctgcatcaccagcaccttgaaaaaattcgataactccatgcaaaaatgtttgcgcataaatggctgttttttcatgccatgatctattgtcttcctgttcttgtaagttcatttcttgtttgtgcaaagtaatttctttcatctcgttttttcgagctgtttcttctataatcccctgaatcgaactcacccaatccatattcaacccttgtgtactaaacgtcccactcacaggactaaatcctttcccgctttgcacttcagcgagtccggctgtgatgctagccgctaattggagggcggtgctgtaattgttgctggacggatgaatgattgaattcattaaacacactacttactttacagaaccattcgtaaacacaaaaatagtggcagttggattctccaaactaccactatttttaacctcttaattcattaaattccgtataaattagttttttcaacattactcatgatacacaatgttttaatttgcttattatagaacttcctctacatcgacactctcaatcttcacttcatacatatttgggatgtttgcttcttttggtacccatgcataataattttgatcattctctaaaataaattgaattaactttgtttctgaaacattccagaaatttttaagattatcaatgtagtcttctaaatcttctttatagtccagtttgctttgttcctacatattcagccacacgtttcacccaaggttcatcacgatcaaaacgaaggaagtcttgctcaaaatctttttcatcattgatgaaattcagggaatatgtatgaagacgttcccccttattcccaaattcgtttcctgctaaacctgttaaaccactggaatctaaacctccagaaagcatagataccactggtttatcagcaattaactgacgttttaccgtatcttgtaaaatggaacggattgtctcaactgttgtatcaatatcatctacatgttctttactttcaagtttccaatactgtgtcgtagtcgagccattagaggtaaacgtcatgtaatgcccagcacgcacttcatgtatatccttgaaaatagcatgaccaggagtacgtgttggcccaagacaaaatatttcagaaagtccttctttatctacctctgcatctacaaatggatgcgaaagtaaaacttttaactctgaaccaaagagaattgcgcttcccctttgagcaaaaaataaaggcttcacacctagatgatcacgaccaagcatcaatttcccaaatctttcatcccaaataccaaaagcaaaaatcccatttagatgttgaacacaatcttcttgccattctaagtaagcatgtagtaatacctctgtatccgacttggtctgaaatttatgacctttctcctcaagttctttacgtaattcttgatagttataaatttctccattgaacgtaaggccaatcatatcatttccatctttatagagcataggttgaaggccaccttcaggatcaatgacgatgagacgtcgatgacctaatgccgctcgttttgaaaaccaatgcccctctgcgtcaggtcctcggtgaatgatagcatctgtcattttttttaacgtttcttgttcattagacaggtctttagaccagtctatccaccctacaattccacacatagtgtctaccttctctcaaatagtatagaaaccgactaaaatccaatatcagtcggttttccgtaaaaaatccgactaaaaacatcttttagtcatgtttatataataaaatgaattgaataaaaaatcaaataattcaatcaagaaagaaatcatcgtccgattaaaaaattattaccttaaactttcatttttatcttaagtgatacagttgcattctattatagttatatactagaaataagaatggtgtatgttattctataagaagcaaatagaggactttctattaggagttacaaaattacaaatgaactaatacagaatgtaaagatagaaaacttcgctaaatatttcaaggatagggtgtagacaatgatcaaattagaaaaagaaaataaaaaaatgaaaatcattcaatctgccacaatactgttctctacgcgtggtgtccgtaacacaacggttgatgaaattgcaaagacagctaaagttggtaaaggtactatttattattactatacagataaaactgaaatattatgtgactgctatatgcgtcatattcagctcaaacgctcacaattatttaatttatataaagaagaaaaagatgttttacttagaatacaaaaaattcttcattatatcagcctagaatatcatcaagatccgtttgtttctacactctttcaagaatataaagagtaccattcacctgaaattacaacttgttttaaacaatctgaagaagaagcaattaacatgataagtaatttgctcgaaaaaggttatcagcaaggagctttgcataaggtaccattaccgcttacagcttttatgttagtacgaatgatttttaactacgaacaggattatataaaagatgataaaagtgatacagaatttctgcagttgctaaaacatatgcttcttaaaaactagttttaacaacaaaaaaataattgtggtacaaatatatgaagaagaacgtgaataatgaatggtttaataaactcttttcattctggccaaacatacgaaatatccaacgcttatgtagaaatgaatgaaaaaatcatataaatttttctaaaattagaaagcctatacttaaatctacaataaaatagttcagtaaaaagagcgtgttttcatctatctaaacacgctcttacaaatatttaaaccctatatgaattgcttattccattctgattttcttttaactaatatatctctttatatacgattatcatgccaaaagtttattggaaaatgattgttctcatcataagcttcaaattcgtaccctttttcttttaacccttttataattactggaactgccgcgacagattgtggatgaatatcgtgcattaaaacaatttcctttgaagacgtcgcacctgctaagacattttgaacaatctttgcagctgctacatcaacgggtaatttattgtatttccaatctaaagaatcaattgtccaatcccatactttcaaattatttcctaccacttcatttcgaagtgattcatttaagccaggcattgatccatatggtggacgtgttaatttcggtgtgtatccaataacgtttctaattaaagattgatcttctttcatttccttcacatattcctgattggtgtatagctttttaaaaacatgtgtcatactatgcatgcccacataattgttttctacatgctctcgtttcactaaatctgggaaccttttcacattatcgccaattaaaaagaatgttgctttcacatcatttttctttagtacatctaatagattagctgtatattttccaggtccatcatcaaaagttaaatatgcaacttttctttctttaccatcaaaacgattaggtatcaatttttttaattcatttttaggtagactgctcacttgctgaacactatttgcctcttccgcatttaccagcttaggattcgtaatagattgaaacacgtaataccctattgctactaaagtaatagccaacaatacacttataattctctttttcttaagcttaattttcatattataatcttctttctatcttaataataatctgtataggtgaaaattagtgccctgcactagcgttcatggcatttcctataatagtcagaactactggaaataatactggtcctaaggtaaggacaatgtttaaaattataataaaactatatagtaagctataatttttactattatggttttcaaatactaggatgactaatgttattatagtaattaaatgtagtaataaaattatcaaccaataatacatcattatagtaagattccactttcctaatagttggtatgttacccctattattatccctaatatagtagcattaaaggaaataaacaaagttctttttagtattttaggaaatgttttgtgatccacagttttattatataaaccgattaaaatgcccaaagatagatatgccagtaatagccctacccaattccagatccaatcttgatcccccattaaattaaacaaaagcgcaatgatccctcctactgcaagaatcgaagagatcataatactatttaaagctgatttcatactattttcacttccttaaaaattttacaatacagcattgaagtctactcttaagttgtcctttacttattagattccttttcattaaaaatcttttatggaaatcccatcatataatccggtcatcatacctaatagcatatacggagaatgggtaggcccagcaaaaattacatgtacatgatcacataccataatttttaaactgaatgaaactccaccaaatcctattccacatggtagatatacaaatagaggatgccattcaccaacttttatttgtatatcaattattcagacgagtatcagctactgcataaccttaaaataaatgctttgatttttcatcgtcaatcaaatagcacatttgattcttattaacttgtattcttccttcttctactgctttattatagcccgctgtatatttaaaaatagtaacccctttgtttctaattaaatctttttcccattttttcgcagctgctgccatatgtacatatgatgttttaaaattaataataatttattataattaagtatatattaacaatatattaagtataagtaaataaaattaataataatttaattttatttgcttatttaaaggggattacatatatgaacgatattaatgttggtcacaaaattagggcatttagaaaaggggccggattaaccagtaaacgtttagcagagttagctgatataacaccttccatgttaagtcagattgaaaaaggaatcacaaatccttcattacaaacactaaaattaatttctgtagcactaaatattccattgtttaactttttcttagaggataccaatacagaagaattagttgtaagagctaaccaaaggaaaaaaataacttttcctgaaagcggcaatgtttcatatgagttattatctcctaatttagatggagcactagaattggctttaatgaatctgttccctgaaactgcttcatctatggagcctgtggcacataaaggggaagaaatagcatttattatggagggacaagtaaaactatatctaaatgatgaggttttacttctcaatacaggtgatagtgttaaaatcccaccttatacaaagcataaatgggaaaacacttctttaaacaaagtcactgttatatttggggtaactccaccatctttttaatttcaaatactagcgaagaaaagttagagaaaataattctctaacttttcttgtatacttaattttattttaagaaattaaaaaacttgtctcccaattatatgagattaaaatctaaacgattaaaactaatgaaatagatctttttaattacacattttagcaaagaaaatgattgattttgtacatgcttaaacaagcgaaaatgtacatgtttatcttgacatttacaccccccatgatattaaaatattttaagtgtattttagcattcttacaaaaaaacagagaagatattagccactatattataaagcgcaaaaacaaactagtttataaactagtttgtttttgcattttacttgatttaaccatccattggatcaataaaaaagtctttatcacactccagtagaaacgtgggattatatatttaaaatttctcaatgtgtgaaataactaaatatggtaaaattatatttgcgagatacatattattaaaattaagatggttcaagtcgaaggaaggcaccttagggtgtcttttctttataaaaaaagacgcattacgcgtcttaaattaatttttactatattgttctttagattttacgctccgtccaccttgttaagcgaaactcaggaacgtacagattgtaaaaaagattagctgcagctgccagctaatcttttttctacaatctgtagttatcgagttgagtaaaggtggagcggtggcttacggaatgtaggcaactgccgtacatcccgtgccatgagccctaccagttttcaagttaaaagcaactactaacatttcaatcaagacaatctaacttataaactagttgacttgatctcgcatctgttctcctactttttccagactgaaagattttaatttttcccaactctttttagggtgtctcttccttgtatgtcttttcttttgttccttcttaatagcatctatcaacatttgtgggctatgatgaaagtatgcttgattgtagccgtcctcaatcataccgaaataatcacattcattgtcaacaaagtaattatctacaattaatttctcaaattcactttcaatataaccccaattgtgtactttactatcagaaattgaaacaccattagaagttatttcgagcttatccaataaatagtccatatactctcttgatattttctctaattcctcaattttcttcatatgttcctgattttccagaataaattcaatatacttcttttccatcactctcagccccttatttctttactgtcccttatctttatatttttccttctagcacttatgcactttctctttatgattttactctaaccagcatactaacataaaacccacgttaagaaataattacaagaatttatatagagaacaccttgcgttctctcaaagaacaacagttaaccgtactctatattgccagaacacgttcgagaacgtgttcttattctgagttctaggtggcattatatttgtatagatatttccccttaagaacactagttgctcttaaggggaacgacatttattatgtgtaaatcacatcgaaaactaaactagttgtcaatttagtttaaactagtttataaactagtttatttatatttataaaaaattagctattaatagctaattttttatatcgcttttcattttattgtatttttctaaagctttaagcgctgctgattttggcttagtacccatttctgaaaccttcggttttattatttgctcacttacattactttcattgccatttccctttatatcagaagatggtatttcttgagcgatgtgagctgatggtacttcaaccttaccgcctatagtatcttcctctttatccgaaatcggcatctcattcgtattattagttttaattattttgttaagctcagatgtaccaccaatcattgttaaagctaaatttaatagcatctcttgtcctatactactagatagcatttcaatttggccctgagacaaattttctgtagttaacgggatatacaatgctcctgtactaccgctatttctattgaacttcaaaccatcttgaattaatttttcagtaagtttatttcgacttatacctaattccgatttcatttcattaaattcattaatccatttagcatctatagaaggtgtaaatgttcttcccttacctgcctcataaccgacgttactcatatataacaccacacttcatattcttatatagcaaggaagaaggtgtgaatccaccttctattatgcttcaacgccttctttatttaattgctctaatagattagctattaaatatgatctacttgtaaagtatgctgactcttgaatgtttttaggtaaaataaagccatcttgttccttcagatctcttaaaccagcgtaaccaaataaaactccaccaccaactacaatgtttttatccgcatttgttttaaaccaaaacttcattagagatgctttttgatcttctgcatattttaacatcccatccattacaatatctgtaacattctcttttacagggccccatttcacactaaatgtcggcttataagtatcatcttcaatcattttctctacttcaggcatcactagcctttgaataaaatcttctcttgttttaaaaggtgactcaatttcatctgtcatgaaactttttaaaatctcattttccatgaaacgttcttttatattctttaaaatttcatcaatatacttatttgttcctaaatccgtatttgtagataattttttatttaactctccatcttcaaagaaagcattatccgaagtacctgcaccaagatcattgatagcatatgattctccaatttctgcatccattccttcaacttccactatttcaccgtttacaatgtcaaatagtattgccaagacagaggaaacaccttcaacattcattgttccatcattaatcgtaatttttatctttttaccctcatatgtaccatctaaaaattctacagtatgttctccatagagcatttctaaaatttgttcttccccacgtagtttataatcttcaattggcattccaccactaaaaggaacagaaacttcttcttttccaattctcgctgctgccaccgccatacttgtgaataatggaatcaaatgtaacttcttatttttctggctaaatttatcttccgtttttcccatttcgtctacagttggttcttgacggtcttcttgatctttagcatatgctcccacataccacgctctgcttcttgcatcaccatctaaagaattactaattatacgaacatgtaataactcgatgtcttcatctttctcatttacgtaatcatttttcttagaaggtgcagattttaaatctatttttgctggcggcgcttctgcgattactgttggaatagcaaaagattcaatattacctttttcattcaagaaactaattttcgctttaatattacctgtatcaaaaccaccaagtaacatgtttttagatagcatttgctcaaccattatattttcctcctacaactagtttatagtttagtttaaactagtttatcaactagtttaattaatgataaaaaaatttatatccatatttaacttttaaacataatgttcgtgaagagaacagtagttgttcgcttcacgaacacattattcacttgctttgtataaagaacatgttctgtaacgtgttcttctcttgaaaagtaatttcgtactcaatatgtattagaggacatcatcaggacgataatgctctacgccagtacactttttaaagtccttgctattccatgtcaaacaaggaactccgttcttagtagatacagctgctaaataagcatcagcaaaatcaattctattggttttatattcatgtaatgcttttaatactacatcactttccaatgttttaacgcctggtgaagtaataattgttgtaagattatcggcaatctcttcatgagaataaccgtatcttttcatacctaaaacccaggtacactctattatcactattggtgttaaaaataatgtaatttcttgattaacagctctcttgaagatttcaaaagccttctttgattgttcttcatcgtcatttgtcaaaaatcttacaatgacattagtatcaactacgtattgcatgtactgcactctcccttattcggaggaaatcatttcttctttagcttcacgtctaatttcttcccaagacaaattcggctcaccagctttaggtggcatagcaccaaacaatgccaacaaagaattttttttaactacatttacaaaaacattgtctccttcaatcacaaattgaatctgatctcctgcttttgcatctatataatctctaatcttagctggtattgtgacttgtcctttctgagaaagagtagacgtaaattgacctgaagacgaaattaaccctctgttctcattttttatttgcatagtacacacatccttctttattttccgtaggtgttgcattttgttatttctcagtaatttaatccttaatactcctatactgtatagtgtattgtaaatgaacatataaatgttcaattcttgatatagtaattagcgtagtattaagtgtgcctctgcttacttattattatactactaccaaaaataaaagtaaagattttttaaaattctttaccaaaaataaaagtaaagaattcatccaggtctttacatcgagagtcaaacttcagattcatacccttgtatttacccatcaatgaaaagtttatccttatgggattcagccgagatacgtgtaaaaatgggtcatagcctggaattcgtttccataaaatgaccttttgctgtctttataggtatataatgaaattttcaacaagatctatataaaaaacaaacgattctttcaacaagctgtcgaggaagaatcgtttgtttttttatagtgagtatctacattcctacaggatcaaactctccaataaagttagtttgtctagcatctaaaataaaaattgacgtttcacgttgtttgtttcgttcagttttcaaagaactacttggtcgctcatttgcgacttccttatgttaacatcttcgttagttaatgtcaactaagtttttcatttcgtttgtcgcttgcgacgttaatgtcatcggcgacttgttctatattacacccctgtagatcaatcgtcaataccttttatattttttattttataaatcataaaagctttgccctctcttaatttctaacacatccttagaacttcttaaacttatgtattcagattaacaatctgcagcttacactctctaacttaatactaatacttttctaaagaatgaatgtgagacccggtaaatatatattaaggatagtattttttcttttagtacgtactccctcctactcatctctagggggattataaataaaacacttctcttctttacctttaaaaaaaggaaagaaatctaatacacttaggaggcgttatgaaatgcatgttaataaaaagataatttatgtatcccatgatgcccatttccacggagcacagctactttctttacatactattaaagctcttaaagaaaactttgattactctgttgcaattatttctattggatccggtattttaattcccgattttcaaaagtacggtcctgtttattgtctcgagcaaggttatcaaacagaagaaaaggtcgaattattaataaaggatttattatcacagaattttaccctcgccatatgtagcactgtcataagtggcgatatcgtcgcattactagctagacacaatataaaagttgtttcattaatacatgaattaccgcatttaatacaacagtactctgctgaagggaaagctaaaaacatcgctgaatttgcttacaaagttgtcttcccttcacaatacgtatatgaaaaatttcgtacaatcactgaattggatcctcaaaaatgtcacattctccctcaaggtttgtttaaccacaatccttataagaacaatattgcaaaagctagaaatgagttacgtaagaagcttaacctgcctctagatagcaaaatcatcttgggtgtaggcttcgcagattatcgaaaaggaatagatctattctcacttatctcttactcagtaagaaagactcacaaggatattcatttcatttgggtagggagaacagacgttcaattcctgaatacactgccccctaaatataaagcacatttcacattagtcgatcctactcccgatatcggattatataacgctggggctgacttatacttattaacttcaagggaagatccttttccaaatgttgttttagaagcattagatgcaaaacttcctgttatagggtttaaaaatgctggaggttttgaagatgttgttacagaaaaaactggtgccttagtagactttttaaatttacccaaaatgctagaaaaaatatatgaatttattcatgatgagggattacgattacaaaagggaagctttggccaagaacttatcgaaaaaaacttcaattttcttaattacatttatcaattactagatcttctcgaacataattacaaaaagataagtgtaatcataccgaactataattatgaaaaatacttacctgatcgaatcgaatcaatattaaaccaaacctaccctctttacgaactaattttcttagacgatgcctccactgatcatagcgtatcaacttttaaaaagctgctttcaaaagaaaataagacccacctgaaggttcaacagattattaatgataaaaactctggttctgtatttaaacaatggataaaaggagtctctgcagcaactggtgattatatttggatcgcagaggccgatgacttatgcgataagacatttttacaagaggtgatacaggggttttatataaataacaatattaccttaagttacacacaatcaaaacaaatagatgaacaaggaaatgtattggctaatcattatttaaattacacaaatgatatcgataaagaaaaatggaaagccccctattttcgaaaaggggtcgaagaaatacaagatacgttacttatcaaaaatactatacctaatgtttcaagtgtagtttttaaaaatatagatatgaagaaaacagaaaaacagttagagaagttcaaaatagctggcgactggttcttctatgtttctcttcttacagagggagatatttacttcaatccagcccccttaaactatcatagacgacatttaaatagcgtaacgagaacagaagattcatactcccattacaatgaagttgtgcaaatgcaaaatttcattaaagaaagatttactatcgacggcatttctaaaatgaaaatgtatacatatagaaagtatcttaaagcatacttgaaaatttaaacatgtgctttctatgccatcaatatctcttgtaagttgctactattactcaagggaggaatactctttgaaagactttatagaggaacataaagatttaatttctcaaatcgcacacagttataatgtaaatgcaagcatccatcctgaggatcatatctttcagttcattgtcactaatcccgtcttcccatcaaaaaaagaagcgatagattactactttaaagatgggcaaaactcagcacaaatactcttaaacttaattacttccctttatcctcctacagccaatccaattcaattgttagaatttgcatccggatacggctgcgtaacacgtcatttattaaatctacaaacgaatttgagtataaccacttgcgatatacacgaagaggccatttcctttattgaaaacaaattaaatacttcttctatattatctcatcctgagcctgaacagttaaaattggactcctctacgtacgatatcgttttttgtctatcctttttctctcatatgcctgatacaacttggtttcgttggctgcaaacattgtataacgctgtttcacctggtggtttattcattttcacaacccatggctatcaaagcaaaaaatactttgggtttccaaatttaaatgaaaagggctattggtttctctcctctagtgaacaattcgatttagatgtgaatcaatacggacaaacgatagttagtccctcttacgtgtgtgacaaaattaaatcattaccccataacccaattatcaaaaagtatactgaaggattttggtgggaacatcaagacctttgggttatagaaaaagaaataaaataataacccacgctctgcttatatacaagtagagcgtgggttattattttttactacataagaactcttcaatccatagcttatttaatctaatcccatgtttaaaatctattttaggttcccaattcaattcttgttttatcttatcaatatttaaaatgattttttgaacgttctcttgtttttgtttataacagataaaatccacttttctttctgttattttctctaattccactataattcgttttaaagaaagacctttgccactccctatgttgtatacgcaagatttcaattgatttaattgtgctagttgtatagtaatttcaactaaatcatcgatataaatataatctctaataatctcctccggattcccatatatatgaatcctttcattactgagatgctggtacaaaaaacaatttatggcccctactttttttaaggggttttggtattttccatacggattagaatatctacatacaacataatctattccatattttctcttataaaaatacaaataattctccagcgaaacttttgttattccatacggggaaagtggtcttaatggatgtttctcatcaataggcaaatattcaggttcaccataaactgtgcctcccgaagaagccaatataatttttttaatacgaaaatctttaacactttccatgaaattaagaaaaaatagactgctattaatatcaccgaaaacatcttcaattgaagttgctacgttagacgtcgcagctaaataaataataatatctatattcactaaagccttatatatatcctcaacattttctaaatcacctttaataaattcaacttcacttataatattttgaggaaaattatttatatgtctggaaaatacttttacattttgcccctgtttcaataaacccaatgcgaggttgataccaatgaaactatttccacctactattaaataattattcttcctcataatatcatctctctagtaataaatttttcctatcgtcaaacttaaaaatatacacaaataaactggatcattttgattattcatcctcttatcattgtatgtttgttataaattttcattatctttattttctattttcattttagaatagcttccttattcaggttgactgcaaaaacactcataatatttactcatccccatgaatatatttaataaacaatcctcacttgtttaccccataaaaaagcttctacatacacaaagttctcaaaaaaggagcgctaaactcatgaaaaatataaatcaagaacttttaaatcatgtaatcctacataaagatcgaattccgcattaccataaagactttccccttatactattgtaaatgtcaagataaacatgtacattttcgcttgtttaagcatgtacaaaatcaatcattttctttgctaaaatgatttggcacgcccttttttagaaaaacaccccctatttatataaaaaactccccttgacttctcatagttggtctttcaactttctatacttattataacacgcattgctatgcgtatcaataggtgagggtaaatttctctgtttttttatatgtttttttatgaatatatcagtatatcgagcacccaaattgggtgctttttattatgtgaaaattacataggtggtgcttagtaaatgacacgacattatttaataggtacattagttaattggcgtgaaagtgtagaaagatttcactacaatgaatcattccaatttttaaaagaagaattccaattaagtgatgaagatacaataaaagcattttggttatctttctataaatggtacgaatacagacacccgaagttacgagagttattaggagaatggtaaggagtgagcaaagcgaatggctaaggaatatgcaaaacgcttttataaatcaacagcatggaagaaatgtaggggggcatatattgctgcaacattagatggaatgtgtgagcattgcaaagaagtacctggatatatcgttgaccatatagtggagattacaccagtaaatataaacaatccagacatcacattgaaccatgagaacttacaatacttatgcttacaatgtcataacactaagacatttagtaagtacagtccgatgagggaagatgtaatgtttaatgagaacggtgaattaattaggagggattagagatgcagtgtaatggtaaggtgttaaataaagaacaagtagacaagttacagttcatgattaataactattctaataagggaatggatatttgtacatgtgatgtagagcgggtactaaacaaacaatatatgaaactaacaaagctagagaaagctattgctcttagcatagtctttaatgctattgataccaaggaactagatggacatgtaagtaaagaaaaattatcggatgtacttaaaataattgaagcgttaaaagaagagatagatgcagataaagagttagaagaagaaaaagaagcgcatctaaatataattaataaactaattgatagtttattagcagaaaagaatcaggaacaaaaagaaccaagccccccctttcaaaaataaagcaaagccccttagggggaccgagaggggagcttcacgtaacacacaggtcattgctatagggggtgtggtcatgggaggagtgaaattttatgagcgataatttagatatagaaaaagaaaaacgaattaagagagagatgacacgattaaacagtttattaaagaatttagagccgaagaaaaagagagctgtttcttcactcataaaaaacgctgcttttatggctgtcactttagaagatctgcaagaagaaattaatcagaatggtgttacggaacaataccaaaacggagcaaatcaatttggagttaaaaaatcttcagctgttgaagtatacaatacaatgataaaaaaccatgtacaggtaatgaaacaactaactgacttgcttccgaaagaacagcctaaagaagaggatgatgggtttgaagactttgtgaataaaaaatgagtaaacgaataagaaaacagtatccattaacttataatccaattattgagtattacaatctcattgaagcaggggaagtaactgtatctagtaaagttaggcggatatataagaaactcgttaatgatatatacgatacctcttctgtatttgagtacgatgcgaataaagccaatcatgtaatagaattcattgagaatttttgcaaacactcaaaaggtaaatggggcggtaagccaattgaattggagatttggcaaaaagcatttttagcagcttcttttggatttgttcataaaattgatgggacgagaaagtatagagaagtactcttaattgtggctcgtaaaaatggaaagtcaacaatcgcttctggaatagggttgtatttgcaagttgccgatggtgaaccaggtgcagaaatatatgcagttgctactaaattagaccaagcgaaattagtttggctagatgctaaaaggatggttaagaaatcccccgtattattaaaacgaattaaaccgcttgttcgtgaattaaatgcagattttaatgatagtacgtttaaacctttgggaagtgattcagaaacacttgatggtcttaatgttcatggagcgatgatggatgaaatacatgcttggaaggataagaatctatatgacgttatagtggatggtacttcttcaagggaacaaccaatgatatttatgattacaacagctggaaccattcgtgaatcagtttacgatatgaaatatgaagaagccgaaatgcttttaaatggtttggacgatccagacggctataaagacgatcgctttttaccaatcatatatgagttggataaaagagaggaatggactgataatactaaatggaaaaaagctaatcctggtttaggtacgataaaaaagatagaccaacttgaaacaaaggtaaacaaagcgaaagcaaattctttgctagttaagaacttactaacaaaagattttaatatccgcgaaacaagtacagaagcctggttaacatttgaacaattaaataacaaggctacctttgatgtagcaaaattaaagccttcttatgggattggcggttgtgatttatcttcaacaactgatttaaccgcagcgaaggttatttttatgcttccaaacgatccgcatgtctatgtattacaaatgtattggcttcctgaagatttgcttgagcaaagaagtaaagaagataagattccatataatttatgggcagaacaaggaatattgagaacaacaccaggtaattcagttcattataaatttgtaacacaatggttcttagaagtcagggatgaattaggtatttatattccgtggatcggttatgatagatggtccgcaaaatattgggtggaggaaatggaaggctactttggtaaagaagcaatgattccagttgcccaagggaaacaaactctttctagccctatgaaattattaggagcagatttagagtctaatttagtaaattacaacaataatagcattgataaatggtgcttatcgaatacagccattgatgtggataaaaacctgaacatacagccgaacaaaacaaataatcagcgtagaagaattgacggaaccgcagcgcttttaaatgcatatgttgtgcttcaagaaaaacgtaatgattacttaaatatgatttgagggaggtgaggaattggggttattcaacaaaatattcggtagaaaacaaccgcctactacgacccgttttgaaatgataaacgataatggagggggctttttctcgtggaatgggaatatctatcaaagtgatattatcagagcctgtatacgtcctaaagccaaggctgttggtaaattaatagcaaagcatatacgagataatgcaaatgaatttaaagtaaatccagagccgtatattagattcattttagaagaaccgaatccattaatgacaggtcaaatattccaagaaaaaatgactgtacagctagagctgaaccataacgcctttgcatatatcaaacgggacgaattaggagttccaattgaaatttatcctttgccatgtgtaacagtagaagttgtagagggagctcaaggtgatatttttcttactttttattttaaaaatgggaagagaatgaccgttccatatgtcgatgttatccaccttagaaaagattttaacgaagatgatttctttggtgaacatccaggtaaagctttatcttccttaatggatattgttacaactaccgatcaaggaattgtgaaagcaattaaaaatagtgcagtggtgaaatggatattaaaattcaaatcggttttaaaacaagaggacattgatgcacaagttcaaaatttcaagaaaaattatttgagtattgataatgaaaacggtggagcagcttcatctgatccgcgctatgatttagaacaagttaaaccagaagcatttgttccagattcaaaacaaatgcaagaaacaacacagagaatttataacttctttaatacaaacgaaaaaatcattcaaagtaaatacaatgaggatgaatggaatgcttactatgaatctgaaattgaaccgttagcaatgcaactttctggggaatttaccaggaagtttttttcacgtagggaacgtggctttgggaacaaaattattttcgaagcagcaagccttcaatatgcttctatgcagactaaaatgaatttagttcaaatggttgatagaggagcaatgacaccgaatgaatggcgttctattctctctgtaggtccaattgaaggtggcgacaagccgattcgaagactagatacagcgttagttaaagacggaaatacaactgttaaagaccaactatgagaagtcaaggggagttttttatataaatagggggtgtttttctaaaaaagggcgtgccaaattattattaacagctgttacaatttttatgcacctagacttacgaacagtcggtgacttaggagcgattacaagaacattaccatcgttctttattccagatgtaccatttacgtttgagacgctgcaaattattttcccatattcaatcgctttagcaattgtagggttattagagtctttactaacagcatctatcgtagatgatatgacaggaaccgatagcaataagaaccaagaatcaagaggacaaggaatcgccaatattatcaatggtttctttggtggtatggcaggttgtgcaatgattgggcaatctgtaatcaatgtaaaatcaggcggacgtggtagactgtctacgctgatcgcaggactatttttaatgtttctcatcattgtattaggagatttagttgtacaaattccaatgcctgttctagtaggaattatgattatggtatcaattggtacatttgattggtcttcattttcttatttagtaaaagcaccaaaaagcgatgcagtagttatgttagtgaccgttattatcgtagttgcaacgcacgacttatctaaaggtgtaattgctggtgttttattaagtgcaatattctttgttgctaaaatttcaaagatacaagtagtgaaacgacaaattgactcctatataacatttgatgtagaaggtcaattattctttgcatcagtagaaagttttgtagatgcatttgatttcaatgttaaaaacagaagtattattattgacttctcaaatacccatgtttgggatgattcagcagtcggggctattgataaggtagttattaaatatcgtgaaaacagtaacatcgttactatacagaatttaaattcttctagtaaaaaactcgtagaaaaattagctgtatataataatacgaatagaaaagtttcatctcattaatccagtattaggagtggaaaccatgtataaaaaaatattattagctgtcgatggctctgagcattccttacgtgcaacacaagaagcggtcaaaattgcttctttaataaaggattgtaaagttgaaattgtatttgtggttgatttttcaaaagcaaagaacgaagttcttcatgcacaaggaaaagaagaattagagttgtcacgccgtaagagactcttgcccattgaagaaaagttgttatcgaaaggtgtgtcttacgaaattaaaatcttacacggagaacccggaccaacaattgtagattatgcgaataaagggaattttgatttagtcgtgttagggagtcgcggacttaatgctttacaagagatggtattagggagtgtaagccacaaagtagcaaaaagggtaaaatatcctgtgttgattgtgaaataacatataacgttcatactgttcctgattttgaagactgttctttcaaaatcaggaatttttataattagatataaaggagttggaacatggagaaattacaagttgggaaaacaaagatttttgctttaggtggacttggagaaatcggaaaaaatatgtatgttgttgaatacaaagatgagattcttattattgattctgggtttaaatttcctgaaacagaattattaggaattgactacgttataccagattacacgtatttagaaagaaataaagataaaataaaaggtctgttcattacacatggacatgaagatcatattggtggaatcccttttttatttaagcgcatacaagtaccaatatatgctgggaaattagccgcagcactcattaaaagcaaattagaggaacatagtatccgtcatgttgaaataaaaaatattctagatgaaatagaggttgaatttcaaaacatgaaagtccggttctacagaactacacatagtattcctgacgcgtttggcatagtagtaacgactccaaatggaaatattgtacatactggtgattttaaatttgattttacacctgttggtacagaagcaaacctacacaagattgctgaatttgggaaggaaggtgtattgtgtttactgtctgacagtacaaatagtgaggttcctggttattcaatgtcagaaaaaaaggttggacaatccataaaagaaattttttcagaagcacaaggacgtatcttatttgcgacttttgcatctaatgttcatagattacaacaagttgtaaaagcttctattttgtataatcgtaaaattgtagttgtaggaaaaagtatggaaaaaacaattcaaataggaaaagatttagggtatatccaagctccagacgacatattcgttggaatacatgaaataaaacatattgcaagtcatcaaataaccattatatgtacaggaagtcaaggggagccaatggcagctttatctcgaattggaaatggaaaccatcgctacattcaaattatccctggagatactgttgtgctctcttcctctccgattcctggaaatgtattaagcattaacaggattgttaatcagttataccgagtaggtgcaaatgtaattcatcacaaaacaagtgatattcatacatctggtcatggtgcacaggaagaacaaaaattaatgctctcgcttttaaagccgaaatactttatgcctattcacggagaatatcgtatgttaaaaaagcatgtggaattagctatggagtgtggtcttcctttagaaaattgttttgttatggataacggggaagtattagaaatttcgaaaagagaagcaagaatcagtagtagaactattccttctcaacctgtgtatgttgatggaagcggtataggtgatattggaaatattgtattacgtgatcgtaggattctatctgaagaaggaattatcattataagtttgaatttagatagtaaacaaaagcaattagtctcatctcccgcaattgttacaagagggtttgtatatatgcgaggttccgaagaactgatgaaaaaaatagagaatattgtatatgaatgtatatctactttactaaatgagggaatgataaattgggcacaaatcaaacaaaaacttgtagaagtgttaagcccattcttatatactgaaacgggacgtcgtccaatgcttcttccaatcattatggaagtgtaaaaaataatagatttagctaatgtattgaatactaatataaactcatattttaaaacgacagcatatatattacacctatctaatatacatgctgtcgttttttctaatcctcttacgtaacaaaaataaacatttttgctacaaaaaaatgcaaactttttatcttttttataacttagaaaaaccttagcttacgaaaatcaagaatttaacttcccaaaatgtcttagcatggtttttatgtcattggattggcgagactcctaaatgaaaatatataatattttgaattatttttttataattggctctcaaaagaaggaatcgctaccgtgctcctaataaaaaatgaattgttttatcctatctcaaaaatacttatactagcagacactgcggttaaagctcctcctccattatttaaaagggttacagttcctgttgtagaggtattgttaaccaaagttagtgtagatgggacagttgtaactgtgaaagcaacattacctgtggtttggatacggtttatagatgtaccatatcgtccccctggaattggtgtaccatttagtgcaaaagaaaattgatttgcctgtaccgctgttaaattaaattcagctacatatgttccggccatattaattacaatattgtcagtacctgctacatgtgtcaatgctgatccagttttaggtcctgttgtattgaagataacggcacttcctactgaaattaattgattagttgtatcataaacatataaatagtttgctgtccttgaactagtgtctcccgttggaccagtagctcctgttagtcccgttggtcccgttactccggttagtcccgttactcctgttggtcccgtatctccgattggtcccgtatctccggttggtcctgttactccggttggtcccgttactcctgttggtcccgttactccggttggtcctgttactccggttagtcccgttggtcccgtatctcccgttggtcccgttactcctgttggtcccgtatctccgattggtcccgtatctccgattggtcccgtatctcccgttggtccggtatctcctgttggtccggtatctccggttggtcctgttactccggttggtcccgttattcctgttggtcctgttagtccggttggtccggttggtcctgttgctcctgttattcccgttactccgatcggtagagctgtgacgtactgtaaagctacatcgagtcagtatggagaatccaattgaaaatgtacatatttattcaagcgttaatgtacatatttaagttagcatttatacccaatattagtgcatataaatatcaaacctacacatcctccctaaacttcgctaaatagtctgttttcgattttcaacaaaatcagtgattcttccttataaaagtacaaaaaactgttacaaccaaatctagaagtttataacaaagtttattagacactgtcacacccaaatgtttcaatttgttgtaacaacgatcgtccatatcccacggattttcatataatctgcccactttacaactgacatacaaatcataaccagaaagatacctaaaacataatgcgaaaacaccctctcgccgaaaggttacggaaaaataacaaataaaacacttattagtcacaataaaggtatcaaaaagtaatcccctggtaatcttttggtgattttattgcattttttgttgcatcacccaaaggatcgtgttacaattacaataaggtatcaaaaagtaatctttttataaccaataaggttttggaaaatattcatatagtaatggaatagtaaacaaaaggagatgtgttttatgagtatgatgtttaacttaaaagcggatattggaaatagtaaagttaagttcaaaattgaagataagattgaaaaagtacctagtgtatacaaacgtttgtttaaacctcttgatccaagtgaaacaaatattgaaaaatgtgttgtgaatttactagatgaattacaggtacatattacaagcaatacaataaagcgtagtggtcaatttttagttggcaaacgtgcgatgaattttgctaaggatacaacaacaatggatattgaagaaggtggaaaacatgaagatgatctaccgattattcatttagttagtattgtagctgcaaaggcaatccaaaaggaatttggagaaactaacaccttaccagcaacacttgatgtaaaagtaaagctaactacagctataccagcaagtgaatggaaaccagaacacgctagagtattagaaaaacgattagtagaaaagccacacattgcaattgtagatgttgctgaagagaaggtgactgtaacagttagttttgaacaagtaactgttactcgtgaggggattcctccattgtatcgaatgattcgcgcgattgctgatggtgagaataagatgtttagaaaatacgtggaattttgtaaacaagaactaaaatataccgaagaagaaatccaaaaaatgttaaaactcgaagtgttttcagcaaagaaaatcctgcatgttgatattggtgatggtacaacagagtacatttatacagaaggattaaatcctaaacctgattcatgcacaggtgaacgtcgaggtatcggacatgctttgttagaagcgataaaacttttacagaataacagaccaggggttggagaaattacccgtcaacaatttgctgagattttattacatgaggaacacaaattccatcaagaagctaaagagtttttctatgagactcgttatgttcaagctgagaatattttgcgcgatattcgtaataaatatagaaataatacagccagtgaagccgaagtcattgcaatttatggaggaggatcaattgcactagaagaagatttggaaaaagagttagtatcgttctgtaaaagaaataaattagaattactatggattccggctgaatatgctgttgacatgaatattgaaggcttagatgtactagaaaaagaagtgttagtttaggttggtgttaaattatgaaggcaaaaacaaaaccagaacaatatggatggaaactaaaaaaagtaaatgatccggaattttgggattggtacgaaaatcaagataatataggtgaatcgttatttactttaataaagttttttataaaacaatatggaacgttagacgtaaaaagctttgaagcacagcaagaaatgcatagagatttgttgatgaaagatgaattttatcaagagttcaacaaaatgaaaaatttattacaagataatacagttgtttctaaagtgatcactgaacaaccttctgttcaaaatattgaaccctcaaaaggtgaatctgtaaaaaaagaggaatcaattaaagaagaaacaaaagaagaagtgaaacaagaaacatcagcaccgaatatatttggtgctgtaaatcgcgataatattgtttgaatatgtgcatcaaaactattaaacagaaatgtaattggtcatgatccatacgagatatatgtacaagattatgaacaaaaaaagtacagggatattgaagtgaaaatgctagttgtccgtaaagggcaactagcatttttttatgagagggtaatagtgaggacagctgacataatattatagtgtgatctagagatcagttatataggtaggatatatacagagataatatatatgtacaagctatgtgatatatattatatgccaggaacgatggatggtgtttcgtaccgaaatacgaaagatgttgagttggatttggatgatggaatatggaatgaatgggctgccggccgccgcggatttactgtagttaaaagactaatagcctttcgattagttacagtattcgtagaatacagttactatctcaaggataacttcagtaatcttgatctttataagaattagaatctaccttgatataataggattttagtatagaatagctataggaataggcacagaactaatttacaagtattcttacgcctattcctatagctattctattcatttctatagtaattccataagtaattcttaaatatattctaaacttattccttagtgtattctgtttgaaatatcgaaggtattatttgagaaattgatgttttcatcactgatccacttcgatattaatgcgaataaagggttaaatgtacttatgaaacattcgtattaaaaataaattgaattttcagaactaaccacgtaatggaactaaaataacctatgatcaggagtaaagaaaacacatcccctcattcttttagatgatgtttcgcgacgaaaaaaacaagaaaagaagaaggagaacataaaagagacaagaaccccctattgcattatgtaagattttcggcgtataattgcggtacacgatttttagaaaagagaggtatatagaaatgaaatacgaaacaagtgtcagcatgtttttgtcttcacttaagagtcgcgggcgcaaagaatctactctccaaagataccaatacgatctatctatttttgtctcctggatcaaaaaaagacacccatccccttctcaagaagtctttcaatctttcgatacaaatacattgtttagtttcttaaatgctcttaaaagagatcgtggagcgtctatatctaacataaaaaggattaaaggagttgtaattaactttttacagtttcatggtaatacaagcgatttaaaaagtgatgttgcccctccaccccttacatcaaaaaatttcgcttcagatagggaaatacgtaaacttatgcgcactataaaaagtttagatggattatcagaataccaggcatccggaagaatacatatcttgaaccgaaatatcctgttagtccgtttcatgctaaagtatggtttatctattcaggacattatttcgctatccatgaacgatttaaaacttagtgaaggtattattaccccaggacaaacaagtgcgtttaaacgcaccgtaaagctatctaaaaaagatagagaattagtcctagactatttaaatgacattcctgaaacgatacggccaaaacaacatagtaacgatccattatttgtagcttttgatttcggaccacaaacatttcgttggaattatgagaaagatgctcctggagcattaacgaaaattggtgtacaaaggatgcttcaaaaagaaattaaacgtgcaagtatccacgttactcctacaacgttacggaatcgttggatactaaatgccttacaaaaaggaatgacgccggtagagatcaagttacatcttggtttaaaaagcattgaagccctacatcgttatgtagtgttttggagcgatatggagaaatctacttaatacggtaagtgaaattttagattatctttaaattgtagtagactgttattatatataacgatagacctgcggtaatatgtcaactaaaaaatataaacgtttaaagttatcaaaggcctatttgcttaaaaaagacatagtcagtatggagaatccaattgaaaatgtacatatttattcaagcgttaatgtacatatttaagttagcatttatagataaattatatgttatgataaaaagcaataaagtacatcatcctgactttattgtgtatgtttagcctatgtatgtcgtttgtattaaaaaataagaagtctcttaaaatgagacttcttatttttgtatcgagggggtattacagatgattaattactatcaaatatttttaattaccatggcaggtattgccttgtttttttatatacaacaagctggaaaaccaacgaaaagaaacaaatggaagtttttaattgtagtatttttattttactttttgaattatttattacttaaattttcatagataaatatagaggatttataaatatcgaatatattaaagaattataagttagcaaaagcaattagtaaagtatcatggtcacagttttgagccatgttagaatacaaagcaaaatggtatggaaaacaagtcattgtcgtatctaaaacattttcttccagacaattatgttcttgttgtgggtctcaaaataaagacgttaaaaatctcaacctacgtaaatgtgtttgcccttcatgtcaaacacatcatgataaggatattaacgcaagtatcaatctaaagaatgaagcgatcaagctgctaaccataaggactgcggagatagtctaatcaattagagttcgatagaactctttacttgaagcctgtagatgtagatgcttacgggatatatatgaaggaaaacgccaccttactgcaagtcctgtatattgacgataaggtcatgtggacacaactaaaaggatatgagatggataaacatgaacattaactgtcagatggtgatacttaagacgattagtaagctatagtttgtaacaagaagacatttaatgagtatttattttcaacaaaatacgggttttgtatggaatttcctgcaatgaattcaccatggataaggttgtctcatatcatgtaaagattgctttattaagattataaaagggtgtgaatgcattggaagatgtttatgtgaaaattgacagtttaaaagcagaacaaaaagaaattatgcgagatattcgtaatttagaaactcgtacaacaattaatgagaaagacatagctacaattaataagcaattagaaaagattagcataaatacaacttggattttacgaattattattagtgcaatcactatgtcggttttggggttaatattaaagggtatgatttaaaaataacagtacttattgagagatggacgagtatctctctttatttttatcattttagccaagatagtttttaaaacatgttataggtaattagtacaattaaatggaagacattaataattgtttagcaatggtaaagtagacgtatataatttaaaagagaacctatgcagcaatacaaataataatttgtatgtgaacgtaaaaaataccaagaccgtcctagaaaggagggggcttgatattttttagttaaaattacgattttttaagtgaatttcatattctgttaaccatactaatatcaagcactttaattcaatcgtttcaatttcgcaagtgttttcttcatctcccacatatcggtgggtggtctttgtataatcgaatcttatctctaaatcgcaattgttaccccattactatcaagttaaagttttataatgcccttaaaatgaaaaacacattattctactataacaatacaattttgtatgcaatattgcatatttatacgttatgcctctattagacattttttaatggtaccatagcaaggtgagagtctataagggttctccttaataggaggaaatatggaaagagtgcaaaaagtttacagtaatccaaaacttaaaagttggattaaacaggtattagctgtaggaggaataatagggtgctgctatttggtgttatatgttttctgtttcttagttatcatgtaaatattatacaattaaactagtagagtcttgcctagagaggtaaggctcttttattgtatctggagatgagcaaacaatataaaatacatcttaggtttgtcagattactttgtacggtgccttgtttctctatgttctagaccactaactcctatcatcgagagttaataaacttctatttaaagtttccatttatattgaaaacagaattctattgataaaaaatgtgtttttactagatatatattaaaaagataagcataagttatattacgttgtgatagaatctttttatctttgaaaaggatttaaattttaataatagatttgagtcctttttgtatattataatccctatgtttgtatataattataatatattgaaaatgatttaaaagcaagaatattagtaggggtaccgctacattgccatcaacttaagaaattaaatgttcctcaaaacgaaaatagtagccgtcggctactattttcgcttttatttaagctagcgtaatgtctctgaaattttgaatgaacgtggtgtgtcagttcatccaaaaactattatgtgctgggttcatgaatatggcatctgattcagcaaatttggtaatcacccaggtgggcaagctgagtatttaaaagttccatttggaaactttactctatttgttataccgtaattttgtgaactggaggatgagtccctcttttttatccgatgttttacagaacccctattggagtgtcataaatgcaaatgtaaagtcaggggatactgttatcgtgcttaattgtggacctgttggattgatgccacaaaaatttgcttggatgaaaaatgctaagcgtgtaattgctgttgattacttagattatcgaatcacttatgcaaaaaaagattagcaatgctggagtatttgagtttagaaattatcccaatatgggggaacggatgtgggcatggatggaaagaaatcacctttggagttttttgaacaaaaattaatgagttttaaagaaacaaatttttgctccttgggggtattaaaacctcttaagttgatggtgacgtggtgctactcctgtaaagatagtaggaggactacaattaaaaagataggcaattctctgtatagaggaattgcctaatgaaacggattaaaagaaataacagacgaaccaattatattaaaaactataatatatgcatatatttataaaaatattttattattaagaatacattaacatgtttttagtatatctgtgttttctactgattctgcactgaaaattatagtaatagcatttaataattaagcttaaggaaaataaaaaatttatttaataattgcctgtgacaaaaatctaaactattaagagtagataggttaagtattcactgcattaaattcaagaaacttaaactaccaaaagggaatttcactattaaatctaccatatacataagtcaattataagatcacggaaacttgattatatgtaaatattattcaattttgtaaaagacattcattgacacttatgtatataagtaactatactcgttacatcgaattgaatgcgtgataatacaattttattattattacaaacatgtaaatataaaaatagaaaatttcaatttgataaatacaatggtagaggtgtttattttaatgaagcacaaattaattgcaacaggtatccttgcaggagctatattatcctattcttctaatattttagcggatactcataaatttcctgatgttcctacatgggctgataaatccgttaactatttagttgataaacaggtattaaatggttatccagatggaacttttggttcaaatgactccttagacagagcttcggctacaaagattatgacaaaagttttaggaatacaaattgatcctactgcaaaaccatcttttacagattcacaaaatcactgggctactccttatattgctgctgctgaaaaagctgggattgttaaaggtgaaggtaatggaatcttcaatccatccggaaaagtaactcgcgctgctatggctacgatgctagtaaatgcatataaactacaaagcacaccaaatcataatgatcaggttagatttgaagatttaaaagggcattggggagaaaaatatgccaatattttaatagatttaaaaatctctaatggtaccgagaacggttggcaaccaaatagatttataacacgtgctgaagctgctcaacttactgcaaaaacgttttggcgaaggggtcagttacacacaattaaacatatgggtaattggaaggtataaaatatgcacatgacgtatacaagttatatagaatgaatgagaggtggaacagatgatgtgtgaagagttattacaagcattggttcaatatcaaatgcagcaaggagaaaagccgaacacattaaggttaaaccaagattactatagagcagtattagagcaattagcttatcctgattggctaattgaaaagaaaattaagaatttggatcagtcgtttctcggagttcaggtggaactaacaagtgaagtggaaacgtttgaaatgaggcagataaaaaaagtggcagagttttgaccgctttttggcaggaaatgtgccggttgttttggaattatcgtgttatatttgtattgtgagaagtggcggaaaacacaattcactatgttgtttttaaatttctaaacggttcgtaatgacggcacataaaatccgaaaccagcagatggtaatgattgaatgatatccgttatgaaggagagcttttgctcttcttccagttacttaatcatgttggcgcaaatgaatgtaacagcattaggtgatcggaagaagggtaaaacttcatgtactttatattataactaataaaaaagatatacattatagtgtatatcttttttcattttgaataaaatggactattaatatcaatatggagggtaaatatgaagaatttaataaaaccaaatgaagtggaaattataacttctgatgaaggagtgtataatggagagttggcaaaagttgttgatataaagatggatagaggagaggttgattatagagtcgtaatgggagatggttcagagttttggattccttcggaaaatacagtgattattttttaaattcttaatattatatttaataacattccatcttctgttaaaattgaaatgtattccaattttaacgaaggggtggtttgtttgaatttaaaagtttatcaaattattcaacttccaaatgatgaaatgctttggaagcaggtagttcaaaaggtggttagcatggggttctttccaggcgagcacaaattacgctattgtgtaaataaagattttaattatgaaaatggggtgtttgtaggtgcacttcatgaacaatatattccagatcaaacatcaatagatgcagatcgagaagaaacatcaattgaaaacattgagccatgggaacgtacaatatttgcaatcgattttaaccatcgaaagttattaattcagcaaagagattactcaccaaaaaatttaagtagaactacagcaagaactagaatcacaggtgttttagatgccatttggcaagaggtatttgaagctgagttcaactatattatgactaatctcttcctgggtaatgagtatttcatcaaaaattttgttgaaaagacaagggtattaggtgcgaagttaagatataacgagaagcatggttgggctgtaactaatatttatgatggtacaaaatttgaagaatcttggaaagacatgtggaatagtgacgagagtcatttgcatgaaattgtactccgtgctcgtggaggtggggatttaaataactctccgttatttaaattggctttaagtcccggtggtttggaaattgagagtattacatattacgactcacaagaagacaagcctaaaacagagtcaagaacagcgtttgatttaattgaagttcctgatgttacaaagagaacagaaattttaactgcgttacatcaatctcataagtatataatggaaaatcagaaaaaattagctgctttaagagcgattaatttagagtaaataaaaagcatccattcgggtgctttttattttggaggaggatgaaggatggaatctataacaaaaataattgctaatttagaaagaagtgttaacgatttacaaagagataatgatggtatgaaacaagcattacttaatgtttcaacgaatatagaagcattgaatagaaaagtcaatatgctagaagaaacgttagcaacgaaagctgatataactcatgttcaacgataaaccaaacaatctggggaggattcacaaaatggctaataacaaattaattattgaggtcagcgctgatacaaccgaagcaatggaaggaattaaagaagtgactgaagctgcaaatgaatgtgcggaagcgttagagaagctagaaaaggttatgggtaggcttacaaataaaaaagattctttatttatagaagttccagttattttaaatggtaaagcaatagcaaaaaaagttagtgagtttactgaaattaaagaaaggttttaacctgaggtgataacaaatgaaactaactaaacaagaacaagcggttgtaattggtacattcatttcaatgctaggacaagaccttgtaaatgaacgcatcgataaacagaaattagaaagagtacttcctatctttaatgaaatgcaagataatacaacaccaaagcaaaagagagaagcgatgattagtttgcttgaaaaagcggtggatgaattcttaaagcaatagccataaaaaaaggaaaagcaactcgcttggggtgcgaatcacttttcctgatggcaatgttaactttattataacaacttgtatttatttggtaaatatataatcgaaatattctttctaaaggagtgaggatagatgcaagtctactgttctagctgcaataaagattacgatatgcaaccacaagtagcacagcttccaaaaagaattgagaagtgtttctacatctgtccacattgtggtcatgagcatgttgctgcatatgtgaacgataagattcgtaagcatcaagctgacattacaaagtatcacgaccggattaataaaaataatctggcaatcgaggatgaaatgaaacggttaaggaagaggatggaaggtgccaagtaaaccatttaagccgtgtaagtcgttaggttgcaacgaactaacacgggataagtattgtgctaaacatatccaaaaggaaaaagaaacagtaaaatattatgacaaacatattcgaaacaaaagctcacgttcattctacaactcaagattgtggaaggaaatgcgtgagcttatttatcgtagagatcatggcttatgtgttcaatgtagaagtaaggacatcattaagataggtgatgtagtcgatcatatcattcctatccgtgttgattggtcgaaacgattagaaccatctaatttacaaacgctttgccatgcttgccataacaagaaaacaaaagaagatgagaagaaaaacaaaaaataattcgaaagaaaaagtcataagcatccccccactatgaaaaagcaaaaggcgacttcctggagaccgccgcctagctttccgtgcaaaaagttcgttttattccataaaagggggttcagccgagggaggtggttcacataggaaggaaagcgaaaccgattcatttgcatttattagaaggtaatacaaatcgattgacaaaagatgaaattgagcagcgattaaaagccgaaaaacagttacaagcaaaaaaggacaaggtaaaaccaccaacgtggttagattcaattgctaagaaagaatttagacggattgctggtgaattactagagctagatgttattacaaacatagatgtgaatgcattagcaacgtattgcgatgcttactctgactatgttgaatgcaccaaaattatccgagaagaaggacttcttgttgaatatacaaataaggcagctgaaacgaataaagttccccatccactacttacaaagaagaaacagttacatgaacaaatgaaggctttggctgttgagtttggtcttacaccgagtgcaagagcgaaaattgtcattccaaatagtaaacaaggtccgaaaacaaatgtagaaaaggagtttgacgtataacatgatcagacaatggatgatggactactgtgatgatgtattacatggtgaagttgttgcttgtcagaagcataaacaagcgtgtaaacgatttttaagagatattgagcgtgaaggttctgaagattttccatatgtttttaaggaagaaaaagcgcttcgtttcttaaagtggatgtctctttttaaacatacaaaaggaaaattagcaggtcagagaattgaaccacattccatgggtgtttttgcccatccccccgaaaagggggaataaggacaacaatactttattcttccaaggagtcttctcgtgttaagctggtgagaatatcatctttattgatactctcaagaatttcctctatatttactactgttggggatttactaaattcataacgaccataaaaattaatatgttgccatgcaattggtgaaatatactgtaacattttcatctcaaaccctgtatctttggattttattaataaattcgataatatactcgcattgtaataaacaacacagttgctgagcagcctactacattcattccagatgtgctgatcttgttcagtcttgaaacgaagtttcccaaagtttgcataggatactgatcgacgtaatttatgatagctttctccacgatttagtgatttttgaacattttgacgtaacgataatgaatcaatatattctaaaaaatataggcttttaatgatgttatcatactcccatagtgcccgcttggtttgatttttccgtgcataagaacttaattttcgaacaataacattttgagtcgtcgtctttaaagcaagagataccataattcgttttatattgtcccattcttttacaatgagatctgtattaattttacgcacaggtttaatcagcaattcttcataatggcttggatgttgaaaaccatataaatttcgagatatcgttgcttgaatatctttatatctaggtgcaaattggtaaccaaacaaatctaaaatagcaaaattaacttcattcgttccatgtgtatctgtagaatggatagtaggttttatattggttgtattattgtataaaatatcaaatacataatggctttcatgctcatttgcaccaataattcttgcttgaattggaatgtggttagccaccattgtatacgaagtgattcctttattcattccaaaatatttagaagaatgacgagactgtagtgtatgaatctgtgtttcgtatttttggccatcactacttgaatggatgaaatcatcaatgttaaaatacgggaaaataggaagcttacttgtggcattactgatacaatcatttacatcttttaatgtttctaatcgaataaaattagctgatgtagtagctaattttgaaaaatctatatcagagacttctcccattctatataaccccatatttgttccccaagctattaaacatggaatgagagtataatcctttgctttttgattggcatagcgtcccagaatatgttcaaagttatctagaaaattgcattgctgatttacaaaatacaggatactcctcatatcaacttgtggtaatacatcgaaaaaagaatgattaataagagatgaagatcgagtatatggaagtgtccaagaatgatgatttttatgttttttcacttgaacatatttgttttttccagaagtaatccttttattaatagagatgatacgagcttccaatttgttttcaagttcttttaaatgttgttcgatgggctgttgtagcttagttaaattgaaatcttgaatcatactctctttatgtacccacgtatcttcatcgactaaatcatcttcaaaacttctatactgtatgctatctctacaaaaaacatctcctgattgtaagcggtaccataaagaatgataaattaaaaattcatatcgatctattagtaaacgttttgaatgcgcatcatctttcgtgtaaaggtaacgtttggccccattttgtataaaggtttgtggaatattttcgatatcatatttaagtaaagcttttcgtttcataaaaacttcttttaaaaaatgtattgcatccataagaggatcttcaatatctgttgtaacaaaatcaatcgtcataaaaataggacgaatttgtctcttgaattgtaaagctaatgtatcaatacgttcccaacggaacgctttttcatctatcttcgaagtattcaggatttgatttgctagctcagttaatttaggacggtctaggatagaaaatacacgtctttgtatgtctttaaatactgtatgttcggaaatgttttcatctattataacttgtaaaatatttccgactttcttgaaatcttcctggttttctgtgtaatagttatatacttgatcttttgcaaaggataaaatatcatcgttgtattttctcattttataaataaaactattgatcaaattatcattcattctttggtatcgatgaaaaataaagcacaataaataaagatttacaagggattcattaaacctttttaatttatatacggaataatattctactaaagaagcgtaatatttaatactttcattagaaatttttagttgtggcaaaattgaattggccagttgaaaaagaggatacatttctttcccatattcaatttcccgtttaatttcattcatactaaagtctttaggttcatgtttgattcgagtaatcttatataaaccagaaggattatataataattcttttaaatgctgtttatccgcctcggatagctgtttttgtataacccttataaggcggttttgttcatatgtaatagcatttcctataacctcttgtataaagctataaccaggaataataattcgtttagtagttaaataatttataagttcgcgaaaaataaaaatcggtttcccacttatagctgcagctctacgagcttgttcttttaaatctagtcgagattgtgaatcacaaagataataattaaagcgcttaagaataagttgttgttgatttagcctagtttttttatcaatagatccaaaatctgagaagtcagcattattgaaatgaactttaagaatatattgaatatcttcttccacttcacataggttaaattgaaaaaataagtgctttgacttaaagtatccaagttgaagaataaaataaatcttagattttattgaacgtaaagtatataacaattcagtttccatttgagaaagagaaaaatattgtacgcgctctttagttgtaaaaagaggtctactataaagttgatttatttcatctgtagttaaaatagttaatcttttttgaatattcatatttaatcgttttctacatctccttatgaattataattataatagattacaccgtgtcaaaaagtatactttttgacacggtgagtttgagtagtttttaatgtttcacaattataacataattatttttgaaatatgtcatgagagttgtatagaatttgacattaaaatataataattatatcttataaccaacaaatttttataaatatagattgtgtgtgatttgaaatgggggaaggaatacataatgaggaaattcttttatattagagtaagtagtaaagatcaatctatcgagagacaactcgcaaccgcagcagagataagtattcctgaagaatacatctttatagaaagagcaagtggaaaagattttaaacgtcctgaatatcaacttatgaaacgtatgttgagaaacggcgatgttttatatattcaatccttagatcgcttgggaagaaataaacaaatgattttagatgaatggcaagaattaattaaagaaaaaaagattgatatcgttgtgttagatatgccacttcttaacactatgaaatataaagatttaaatggaattgaaactcttatttcagatttaattttacagttattaagctatatggctgaagatgaaagaaaaagaatccgcgaacgacaaaaagaaggaattacaattgcacttcaaaaaggagttaaatttggccgcaaaaaagttgaaattgatgataattttaaagaagcttatcaagaatggaaaaatcataaaattactgcagtagaagcaatgcaaagagtaggcatgaagagtaatacattttatagaagagttaaagaatatgaacataatttggaagaaaagaagctctcttaaatagaaaagcttctttttacatactaccctatttcaagagaaattattaaaagtcaaataaatcccctttaaataatttgatttttcgttattttttgtcagttatgtgttataatgataatgtacatgtaaaatggtttgaaatattagtatagactcattcaggaaaagcgcgttctacaatagaacgtgcttttgtagtcagtatggagaatccaattgaaaatgtacatatttattcaagcgttaatgtacatatttaagttagcatttataatactattttggagtcatagaagcggatgcacctcattagctaattggttcttttttcaaattggattatttactgaagcaaagaaatacaatgactttattcattactatgagttctgggtgtataaaaacagtacaaattacattcaacaattacaaaatagtcttctagaggctaaaaaaaatgtttgtaaacttgtacgaaatccttatacaagagctgtcagctcatttttattacttgctgacaatccatatgctagcccacaatgggagagcatccgtcattatttttataatgataaatatagtaatcaaggaatatcatttaaacaatttttatattacgttcaggcattcggttccaattccctatcattagatatacattttagtcaacaatacgtccctggtgaagaaaatttcattcaatgctatattcctttagaagattttaatacacaaatcaccaagatggaacacatgtacgatttgatgaaatcccctttagcacttcttacaaattcagatcatcatcgcgctcacaagatgatttatgcaggaagctatgcagaacttagcattacagatccaggctttccccgatttccaacatacgaaagcttttatgataaagaaactatggatttagttacagaaatatacgcacaggattttgaaatgtacccatacacgaaagggatattttaagtctatacatttttccacgaataaaagctgatacatcgcatagcataaagtgaaactttaattcgagtgggagttctctccaactaattattcccttctcctaatcgtaattttaagagatacctaactttcacccatttcctttaatttcgccgattgttgacgtgtatcatactttccatacatagattgcatttattaacataggagggatatcgtgtggaaatcaatttgaaacacaataatgggtactgcgttatttgcgaaaagaaagctacatttatagagcataatgattggcttagagatcattatttatgttctacatgtaactctataccaaggcagcgagctttaatccatgctttacatacattttttccaaaatgggattcctataatattcacgaatcctctcctggaggaattacgactcagctactattaaaaaactgtaaaaactatacttattctcaatactttagaaattatcctcttggccaatactttcaaggtattagatgtgagaacttagaagacatgacttttgaaaatgaatcttttgatttattcattactcaagacgtttttgagcatgtaatgacgccaaacaaagcctttaaagaaatagaacgagtattaaaacctggcggtgctcatgtatttactgtcccttggtatcatacactcacaaaaactgtgcaaagagcaagaatgaataaagaggtgattgaatatattgaagagcccatttatcatggaaaccctattgatgagaatggatctttagtaacgttcgattgggggcaggatatgattgaatatatttatacacatgcaaacatgtatacaattgtttttttacaaaaggatagatcactagggttagatgctgaatttttacatgttttcattagtaaaaagcaagaaaataaagtttaatcactatataattcggaggtttaacaaatgaataactttaagttaggaagtgattttgatcatcttgttaattcactatctgatgccgaacttctaaatttatttatacaaagttgttcacaaacaacgataaatggggttcccgtacctatgtttcctcctgaagaaattcaaaaacaatttgtaggtgcttcttatgaacatgctctttacgaagcatatttgttttatagccatataaaagaatacgcccaaaatttaggagttcccttgaataaagaaagtaaagttttagacttcggatgcggatggggaagaattatacgcttcttatttaaagatgcctctgatcaaaatttacttggcattgatgtcgatcctgcgatgatcacactttgtaatgaaacactaggaagagggatatataaaacagcaagcccacatccccctgtagattttattagcgacaattcattagatatcatattcgcttattctgtattctcacatttatccgaagcaactgccgaaaattgggtaaaagaattttcaagagttcttcgccctggtggaatcttcatcgcaacaacacaagcgcgctattttcttgatttttgtcaacaatttcaagaacatcctgaattaattcaaacaggatggcataaaactttatctcaagcttttccagatatacatcgcgccatctcggattatgaaaacggcaaatttgttcatagccctactggtgcaggggatgctagaaatagtagtttttacggagaaaccgttatacctaggacttatattgaaaatcattatgagaaatatttaaagctacaagacttttttgatgatgtaaatcgattaccacaggccctctttgtccttcaaaaaatttaattcctttcattcaacgtaataaatttcatgacgaaaagtactttctatttcagatatatatcaaattacctaatactctcttattaagtaagcttaaaaaatccaatacataccataaaaaaaacagtaaacagataacatatctcttattttaaaattgcttcaccaaatcaagaataacttcccaacacttgaactacgaaaaacacgagggggatataacttgaaaataatcgctttttacttaccacaattccatcaaattaaagaaaatgatcgatggtgggggaaaggatttactgaatggacaaatactaaaagtgcacgacctttattttcaggacattatcaacctagggaaccttatcaagatttttattacgacttaactaccccctccgtaagaaagtggcaagcaaaaatcgctaaagcatacggtatatatggtttttgttattatcattactggtttaaaggaaaaagactattagaaacaccctttaatgaggtactaaagatgaaagaacctgacttccctttttgtctttcttgggcaaatgaaccatggacaaaatcttgggatggtctcgataaacatatattaatgcctcaagactacggagatatatctgattggaaggaacactttgattatttattacaggctttccaagatgagagatatatttatatagatgataaacctctattcattatttatcgtccaggacatattcctgattgtgaaaaaatgcttaattactggaatgcattagcgcgagaaaatggtttaaaaggtatatactttgctgaaacattaaacagttttccactacctaatataaatggattcgatgctagcattcagtttgaacctttctatacaattgcccatgatagctcttcagacataaataaggtaatatatgattctgatatgcaattaaacgtttgggactacgataaagtatggatgtatatattacaacgatcgctcccaaagaaaaaaacatttcctggtgcttttgttgattgggataatactgcacgacgtaaaaacgcgaatagcagcatctttgtaggttctacccctgaaaagttcaccatatatttaagcaagcaaattcatcggacttactctttttataacagcgagtttttatttattaacgcatggaacgagtgggcggaaggaacttacttagagccagataaaaaatatggattttcttatttagaaggggttaaaaatgcaattgatagaggtatgaaagcatacaaaaaagacgagtcattctgactcgtcttaaagttgcttggcgacgtcctactctcacagggacaaggtcccaactaccatcggcgctagagagcttaacttccgtgttcggtatgggaacgggtgtgacctctctgccatcataacaagagaataaaactgagaacactgttcagggatacacatcaggtattagacagtacataaaatggtttgaaggttcctatgacagaaaattaacaaaattgtaccgacaaaatatcttagagtacattagttatttaaagaatgtcaaaatgttgaacgccaagtccattaaccacaagattagtagccttgctaaatttaatgaatttctaatacagaaaggaagtcaacaagatcaagtaattttaaaaacagacatgataaaggttcaaactgtctatgcttctccaacccaaattgttgaattagatgtaaaaaagtttttacaaagtgtgttagaggataataacaaacgtaattatgcaattgccactctcctagcatatacaggagtacgtatttcagaggcattatctatcaaaatgaatgacttcaatttacagactggggaatgtattattcgaagtggaaaaggaggtaaacaacgaattgtattactaaatagtaaggtacttagtgctatcaaagattatctcatcgatcgaaaaacatacagtacagcacatgaatctccgtatctttttattagtaaaaagcgagaaaagctcgaccgtacggtcgtcaatcgtatctttaaatcatacagcaatgttattactccacaccaattacgacacttcttctgtacgaatgcaattgaaaaaggatttagcattcatgaagttgcaaatcaagctgggcactctaacatccatacgacactactttacacaaatccaaaccaactgcagctaaaaaataaaatggagctcttataaaggagtaaaggggaaacaatgggagttaaacaattactgtcagaggcacaacgaaatgagttaatggatttatcacgtttaacagaatgggatttggtaacatttcatactttttctaaacatgacttacatttaatattaaaacaccgtagaggatacaatcgtttagggttcgctcttcagcttgcattaattcgttatcctggctggtccttaacagaatataaagacattccacaatatgtagtggcttacgttgcgagtcagttacagattccacctgaagaatttttagtatatgccaaacgtgggaatactttatgggagcatcttggggaaattcgaacagaatatggatatcagaatttttcttctgaatataaagaaactttattacaatttttagtgcaacaagcaatggataacaataataccctctatttaattgaaataacaatatctacattgcgaaaaatgaaagtcattcttccagctatgtatgtgattgaagatatcgtctgggaagcaaagcaacaagcagatcagaaagtgtatagtatactacatgacggtttggtccaagaacaaaaagatcaattagatgcgttacttttaccaactataaatggtaaatctccattagcatggctaaaagatgtaccggcccagccttcaccagaatcatttttaaaagtaatagaccgattacaatttgttcaaaaaattggtcttactattgataccacaaaaattaatacaaatcgtcttcggcagctcgctagattaggatcaaaatatgagccatatgcttttagacgattcaatgaagtaaaaagatatagtatgttagtctcatttttattggagattacacaagaccttatagattacgcaattgaaattcatgatcgtcttatgatgaatcttcaaacaaaagggaaaaaagaacaagacgaaatacagcaagcaaatgggaaaaaattaaacgagaagattttacaatttattactgtatgcgggacactaattgaggcaaaagaaacgggtaaagatgcttttgcagccctagatgaagtaatgtcatggaatgagatggtcgaatctgttgaagaagcaaaacaactatcacggcctttaaattatgactatttggatttgttaaatactcgttattcctatgttagacgatatgcacctactttattacgcagtcttcattttagagcgacgaaatctggagaacccgttttacaagcacttgatacgattcatgaattgaatgaaacaggtaaacgaaaagtgcctcatggcgctcccttacactttgtatctaaccgttggcaaaaacatgtatatgatgatgacggaaacattaatcggcactattatgaattggcagctttaaccgagttaagaaatcatattcgttcaggagatatttttgtatcaggcagtagacatcataaggcatttgatgattatcttataccgtatgatgaatggaacgaagtttcaaacattccaaatggccttacagcccctttaaaagctgaagattatataactgaccgaataaaccgattaaatgaacatttagaatggttatcaaaaaatagcgagaaattagaaggagtagatattagtcaaggaaaactacatgttgagcgattggatagaggaactccagaagaagcaaaagcatttagtaaacttcttcatagtatgttacccagaataaaactgacagatttactaatagaagtggccagttggactggatttcatgatcaatttatccacgcctctaccaatcaatctcctgatcaagaggaacagaatattgtattagctactttgatggcaatggggacaaatataggtcttacaaaaatggcggaagctacccctggaatctcctatagacaaatggcaaatgcttcacaatggagaatgtatgatgatgcaatggttcgcgctcaatctattctcgtgaatttccaaaaggaacaaaagttatcatcctattggggagatgggacaacttcttcttctgatggtatgcgtttatccattgctgtacgttctctacatgcagattccaatccacactatggaacgggaaaaggtggaaccatttatcgatttgtaagtgatcagctatctgcctatcatgtgaaagtcattactaccaatgcacgagatgctcttcatgtattagatgggcttcttcatcatgaaacagatttaaaaattgaagaacattacacagatacagctggatatacagatcaagttttcgctttaacacacttgttgggatttcgatttgctcctcgtattcgtgatttggcagatactaagcttttttctatacctggtggagaagaatatgaaaatgttcaagcacttttaaaaggaaaaattaatgtaaagttaataaaagaaaactatgaagatattagaaggttggcatactcggttcaaacaggaaaagtatctagcgctcttatcatggggaagctcggatcatatgcaagacaaaataaactcgcaacagcacttggagaaatgggacgaatcgagaaaaccctctttacgctggattacatatctaataaagccgtaaggagacgggttcaaaaaggtttaaataaaggagaagcaatcaatgcattagctagaattatattttttggacaacgtggagaatttagagaacgtgctctccaagaccagttacaaagagctagtgcactaaacataattattaacgctataagtgtgtggaacactgtatatatggaaaaagccgtagaagaattaaaagcaagaggagaatttagagaagatttaatgccatatgcgtggccgttaggatgggaacatatcaattttcttggagaatacaaatttgaaggattacatgacactgggcaaatgaatttacgtcctttacgtataaaagagccgttttattcttaatataacggctctttttatagaaaaaatccttagcgtggtttttttccgaaatgctggcggtaccccatgtctttttttagtaaataggcctttgataactaaaaattcttttgtttttcagttgacatactaccgcaggtcttttttatttcattataaaaattcttttacatttaaattcattattcattttgtccatgctacaaagtaaaatccgtcattataattttatctcgaattcgagatattaatcacaaaattacgtatcggcgtctaacctattgaattatctcgaattcaagataattcacaaaaaatatttgttcgatttataaccataataaattttcattatgaacattatttatctcgaactcaagatttattataagttacttattttttattgtcaataagtccttactttcatttttcttgttttcacttatggttccctaccttaacaaacattttttgttctttcaagtgaacgagcacttttcattacatgtgaaaacctttataaacgcctttatcccagtggattacaatgatttttcaaggaattaaagtaataatattcagaagattaaagagtgttttttcacaccttattttcattcctttacccgataaattttaaaaactaaaagccatacaaatgtatgacttttagcttattgacgtctcaaattttgctttctctacatatactttacgaaatttcatatagcatccaatacgccaaggtactatataacaaaccgcaagagtgtagaaaagaatgccgattgactttggatctagaccttgtaaatgtcttctaaaataagcacgtaaaagaacgataactaaaaatgtagcaataaaagcgatacttttttttgcataaatttgaccatcttctctgacttcatacccacttaaaataataagtggaattgacaataacagtccgatcccagcagctataccaatttgccaaccagcaagttgtatcggtgctgcgtataaagaaaaacctggtaataagaagaataatggcaatagtagtcgtcttcctttattattaattggtcgattcatagagcgcatgcgtctaaatataacgagccctatgacgagtaaaaaaattgtaatactgtacgaaccttgctgcaagtgaatctctccctaaaaatagtcattttcaaaaatactcccctattatactcctaatttttccaaaaatataattattcctctaaaaaatcttacacatcaaatatacttttaggtttgatttactataggaaacaattccgaaagaggaactactctccccacctcgtctttaaacacaatatgctctctagttaaatggcgcgggctcttcactcccgccgctgccgctaatgaaaataaactatatctcatactaataatataattcatgactcgccacttcttctcatacggatctaacgctttttgataatgcggattcgtcgtggctacaccagatggacattgaccagaattacattgaagggccataatacagccacttgccatcaaaaacccacgggctgaacttacagcatccgccccaatcgctaaagcaatcgccactttatctggtgtgattaatttacccgatgcaaatactttaaacttgttacggacaccataatggtttgctgtatcaataaatgtaagtaatgctggaataagcggcagtcccatacaatctgccatcgatttatacgttgcccctgacccgccttctgaaccgtcgattgtaataaaatctgggtaaatgtttagttctttcattgtttttattaaatcttccaaaggctcctgctgaccaattacaattttcattccaactggtttaccgctgttttcttgcaactgttgaataaaacaaagtgtatccgctgcattctttaaaaatgaaaatcgattcggtgaattaatcgtctctccctttcggacgttgcgaacaaaagcaattttctcatttactttttgtccctctaaatgaccaccacgtattttagcaccttgcccaaatttcaattcgaatgctctaatattactttctttcgctttctccatgaattttcccattgaaaaattaccgtcttcatcacggtatccaaataaccctggaccaatttgcgcaacgatactcgctcctgtatgtaaatgttctggaataacgccaccttcacccgtattaatccacgatccgcctgccatttttgctccaaaaccactcgctaaaatataattttctccaatcgcaccgtaagaagtcgcagatgcaccaaacatgccatgtagcttccacggatatttacggttctcaccgactataattgcatcatcttcttcgtacagccaaagattcgttgtatccgctgtcaatttttctcttcttgaaaataacccttctttatgaatcacgtactttttaccttcccgctcttgcgtgagattcacacttaattcctcagttaatatcggaaataatgtattagcaatataatatccagaagcttcaaaatctcgttttgatccaaaaccaagtatttcagagcgatatttcgctaaaaacataacactttgaaaatcataacgtgagaaaggctttccatccgtatcatgatcaaaccaatattgtcgaaattcaggccctatcttttccagtaagtagcgcattcttcctaagtacggatgtaattttaaaatagaatggtgtgttcgtttttttataaaaaatgtaatgataaaaaagacgattaaaagcaacattaaaaatagtaatatactaataataacgagtagcgtttcactcatcccgcttccccctatgaaattccataataaaaggagaacactcgatgtgctctccttttatctttattcatactaacgtagcaagatgctctttcgcgtcatattcaactaaactttcagcgtgtttaattcgatgaacaaagtctggattagcaattaacggtcttccgaatgccgctacatcaatcgttccttcttgcaacgcttcttcggcctctttcggatttaaattaccaaccccaacaatcgtaccatcccaatattttcttactagttgatgaaaattctttccgtcagcaatctcttgcgtataattcatcgttgaaggatggatcatcgttaacccaacctctttaaacatatttatgaacgtttcaattgcaaactcaggattttcccacatataagtaggattatcacctttgaaagcagagaaacgaagaagtgttttattagctccaacagcttctattacagccgccgttacttctttcataaacgttaacctttgttttaaatcaccgccatatttatctgttcgcttattcgcaaactcatacgtaaattgatcgattaaatatccgtgtgcaccgtgaatttctactccatcaaatccagcttcgatcgcatttttcgcagcttgtgcgtattgaccgatcacttcttgtatttcttctaacgtcattgcttctggcgtatcaaacggtttacgaaagcgtggaacatttccctctgcagcgatagccgatggtgcttgtggcatttgaccaccaattatttcatgatgactcatacgcccaacatgccatatttgagcaataatcgtcccgccttctttatgtactgcctctgtaacaggtttccaagaatcgatttgttcttgtgtataaatacctggtactcctgggtttccttttgctctcggactaatgacaattccttctgtaataattagtccaattccatccgcagcacgttttgttagtgataggtaaggatttgaagttatctctaccttttcccccactccacaccgtacgtgagactttcacctcaagtcagtatggagaatccaattgaaaatgtacatatttattcaagcgttaatgtacatatttaagttagcatttatacttaagaacaaaaataaaatgaactttcgttcaaagcaactaaaaaactcgtaatgtacttttggtattgaaaagtacacacaccaaataaactctaacgagtttcattttaaaaattatgcagctttcttttgttttccaaacccattatactcatagacaacacccataatatcaaagatagttttcctctcatatcgatgagatttccgtccattcttctgtaggaggtcgaacaaacggattaaaatctttgttagatcttgggtgtttctctgtatcgcttgatataacagcgatacatgatcttgaatcatcccaatagctttatattcacttaattctcttttgttcttttgcaacagaagtttacgcatcttaaacatcgtagaagaacagataaaaatggcaataagccttccatacacatgacattctaatcgctcttgtttgatattttgccaatgatgaatttgaaataaggatttccaagttttaaaaatgatttctatttgccagcgaagggagtaaaagtcatgtatttgttccatcggaacaatcccttcaggcgtatttgagacatatatgttgatacccgttaatcgtttactcttttctgaaaacgtaataccctttttactttccgtataggcttgtttttttctacgttcctgtatctgtttttctgttaaacgatagataattacgcgcgtgaatagtttttgattctttccaatgtaagcttcttttatttcatatgtttgaccgggttttaaatggttcatgatatgttctaaatcaacttgaatatactgtgattgcttttttacggttccgtttcgaaagtattctggagacggattttttatataaacagtatggtttaattttaatctggatatatagtaggcacctcgttgatccatttgatctaagtcttctaatgaaaaataacctaaatcacgaatgcacaagtcacctggacgtaaggtatctaaacattccgttccaaaggtcttatcattatttttccctggacccacctgaaagtttaaaaattgaccgctatgtaaatcatactctaattgaatcttgatacccgctgtttgtgcgcaaccaccggatccaggatatatactagctaaatgttttgggatttgaaaaatcgtcgcatctaaaatacgaatacgttgaaagtgggtaagcgccgtgcttgaaatagccgatgttttacaaagtttacttttccataatgtagaaaaaatatatttcagaaattcaacagcttttttatcaaagcgtttattaagtccttctggactcataagagtacctgtagctgcatgtaattggctacataatcgaacgagggaatcactcgctgtcctttgacttatccaaataaaaatggtagctaattcacttcctgaaaattttcgttttctttttacaaaacctaatttttttgcgagttcttctaaaaaagaaggggttaaatgacggcacagctcttcagaaaatagttgtaattcatcttgaatcgaaagattcataaaaaacgtcatcctttctagttagctttttagaaagaataacgtttttttacacttgggggtagtctagattcttaagttgatgggcatgtggaacaatctatattttgattaatttttcgttggggttactatatggatttttgatgagattccctttattagaaactttgattatagcgggggttattacaatttcttctagtgctatcgttgcaaaagtgctagttgatttaaaaagaacagggaataacgaaacggagctaattttaggaattatcatgtttgaggatatattccttgctgtatatttatcagtggtttctggcttagtacttggtgatcatgcttcatttttaggtgctcttacctcaattggtatagctttgggatatatgctcttattctttattgtagctagatgggctactccgttattaaataaattgttgaatattagttcagatgaaatttttattatagtagtattttcttctttattctttatcgctggtttttctgaaacaattcatgttgcggaagcaatcggagcgcttctgttaggtttagttttttctgaaacagagcatagtgatcgaattgaacatcttgttgtttcatttagagacttttttggagctatcttcttctttagcttcggtttaggtatagatccgttttcgttgggtggagctatatggctaacgttaggtgctgtactactgacaatcatcgggaactttgtagcagggatgattgcaggaaggcaagctggattatctcataaagcatcaacaaatattgggttaacaatagtgtcaagaggggagttttcaattattatggctaatattggtatagcgggtggtttaatgtcagtgttgaaaccgttctcagcactatatgtacttatcctatctattttaggaccactctttactaaagaatcgaaaaaaatatataaatttttaaataaaatatttaggtgggatacaaaatctacttaaacttaggacattgaactactcaccacttaacgtccttacagactttttgaagtgggagattcctgctaagataaccaatgtatccaccggttatcttagcaggcgctacccgtagtccctacagtgagaacataagtatcttgtacattgacgcaccacactccctactttagtttggttttcgcaacttcggcaagcatggggcgaaagaacgttgaagattttacagttgcaacgtttttctgaaaccaacctcataacttcagttttcgaagagcaatctgtataagtaaatgatagcaaatatgttggcttatgcctatcgatattcatatcccacctaaaattggtgtttcacaccttgacatttttgaggaaggagtcttctgttggaaaacgataaaatctttttaattacttgaattctaagtgtagaaactttgtaatttgtatgaattgagggattgaattccttgtgttaattaacatatatatcgatttgatataaagataggatctaaaaggagctaacaaactgttagctccttttagatcctttttaagtatatcgcacaaaaatcaaatcatacatcacgaaaagtagcttttaagaacccctattttaaatgttttgtctagaaaagtatggataacttcatgaatgggtgaaaatatctatgcttttttattacaagacaaagatatactgtactcataaatgtagaaatatctatttaagaaagattgaaatcatatccaataatctgataggagatgtagctatatgacagtattcaatactaaagaaattaataacacaccttttgaaagtaatatcattccaaaaggaaaccgtaaccgtcctgcatattccatgaatccaagatatatcacaattcacaccaccgcgaatcaaaatgcaggtactgatgcaagagcgcatgctagatatgttaacaatggtggtggatcatccagcgtatcttggcactttacggtagacgataatcggattgtacagcacttaccactaaatgagaatggttggcatgccggagacgggaatggagcgggtaatcgctcggttttggcgaaggggtcagttacacacaattaaacatatgggtaattggaaggtataaaatatgcacatgacgtataaaggttatatagaatgaatgagaggtggaacagatgatgtgtgaagaattgttacaagcattggttcaatatcaaatgcagcaaggagaaaagctaagcacattaaggttaaaccaagattactataaaacagtattagagcaattagcttaccctgattggctaattgaaaagaaaattaagaacttggatcagacgtttctcggggttgaagtagaactgacaagtgaagtggaaacttttgaaatgaggaggataaaaaaagtggcagaattttgaccgctttttggcaggaaaaaggccgacgttttttataaaagcatgttatatttgtattatgagaagtggcggaaaacacaactcactatgtttttcttgaattctaaacggttcgtaatgacggcacataaaatccgaaaccagcagatggtactgattaaatgataccgtccataaaaggagcatccatttggatgttcttttttattactaagcgaaccacataaacataagtatgagaagagcaaaaataaataacaaacagtgtgcaaacttcatgaagtactccttttagaattaatatgtattaaaagtacaaataatctaatataaatagtgaaaataggtatacaacaatgtaatataagtcagtcattttatggagcaagggtggtaatcaggatgagtggctattctaaaattattttatccaatggaaatgaatatattgtgccaatccagcctagtcttttgattgaaaaggaacttatagataaggatggggaaatttacaataagtttattcttgttccacaaatagatatagaaacagggagtaagatgcaatttaatttaaatcctcagcatatagcaacaattgaagaatttagtataagaagacaaaagaccgttccttccgtatttagagtggaaacaaataatgaaagattgaagggaaagcatccatagcaggtgctttttttatttttaagggggtgaaaaaatatgttctttttcaaaagaaagaaacggaagaaggcagttgctcaaagcaatataaaaaagaatgctgaaagtacaaataatgatttgttaatccaaacgacaacagcaagtgtaataagctctagttcagattatggtggctataatagtaatcattcaacttcatgttcatcgcattcatcgtatgatttaggaagttcatttgatagttcgtcaagttgtgattgatcaagtagctgagtatctgctttttatttcggaggaggatgaaggatggaatctataacaaaaataattgctaatttagaaagaagcgttaacgatttacaaagagataatgatggtatgaaacaagctttacttaatgtttcaacgaatgtagaagcattgaatagaaaggtcaatatgttagaagaaacgttagcgacgaaagttggtataactcatgtttaacaattaattaaacaatatgaggaggattcacaaaatggctaataacaaattgattattgaagtaactgctgatacaactgaagcattagaagggattaaggaagtaacagaagttgcaaatgaatgtgcggaagcgttagagaagttagaaaaggttatgggtagacttacaaataaaaaggattctttatttatagaagttccagttgttttaaatggtaaagcaatagctaaaaaagttagtgagtttactgaaactagagaaaggctttaacctgaggtgataaaaaatgaaactaaataaacaagagcaagcggttgcaattggtacattcatttcaatgctaggacaagaccttgtaaatgaacgcatcgataaacagaaattagaaagagtacttcctatctttaatgaaatgcaagataatacaacaccaaagcaaaagagagaagcaatgattagtttgcttggtaaagcggtggatgaattcttagaaaaatagctataaaaaaaggaaaagccactcgcttggggggcaaattacttttccaaatggcaatgttaattctattataacaatttgtatttatttgtaaatatataattagaatattcttttaaatgaggtgaggatagatgaaagtctactgttctaactgcaatgaagattacaatatgcaaccaaaagtagcacagctttctaatcgcattgagaagtgttacttcacatgtcctcattgcgaacatgagcatgtccctgtatatgtgaacgataagattcgtaagcatcaagcggatatagctaagtgtcatgaacggattaataaaaagaatctggccatcgaggatgaaatgaaacgattgaggaagaggatggaaggtgccaagtaaaccattcaagccgtgcaagtcattaggttgcaatgaactaacacgggataagtattgtgctaaacatatcgaaaaggaaaaagaaatcgtaaaatattacgataaacatattcgaaacaaaagttcacgttcattttacaactccaaacaatggagagagatgcgtgggcttatttatcgtagagatcatggcttatgtgttcaatgtagaagcaaggatatcattaagataggtgatgtagttgatcatatgattcctattcgtgttgattggtcgaaacgattagaaccatctaatttacaaacgctttgccatgcttgccataacaagaaaacaaaagaagatgagaagaaaaacaaaaaataattcgaaagaaaaaatttataaacatccccccaccatgaaaaagcaaaaggcgaattcctggagaccgccgcctagctttccgtgtaaaaagttcgttttattccataaaagggggttcagccaagggaggtggttcacataggaaggaaagcgaagccgattcatttgcatttgttagaaggtaatacaaatcgattgacaaaagatgaaattgaacaacgattaaaagctgaaaaacagttgcaagcaaaaaaggacaaggtaaagccaccaacgtggttagattcagttgcaaagaaagagtttaggagaattgctggtgaattattggagctagacgtaatcacgaacatagatgtgaatgcattagcaacatattgcgatgcttactctgactatgttgaatgcaccaaaattatccgagaagaaggacttcttgttgaatataccaataaggcagctgaaacgaataaagttccccatccactacttacaaagaagaaacagttacatgaacaaatgaaggctttggctgttgagtttggtcttacaccgagtgcaagagcgaaaattgtcattccaaatagtaaacaaggtccgaaaacaaacgtagaaaaggagtttgacgtataacatgatcagacaatggatgctggactactgtgatgatgtactaaatggcgaggttgttgcttgtcagaagcataaacaagcttgtaagcgatttttaagagatattgaacgtgaaggatctgaagattttccatatgtttttaaggaagaaaaagctctccgtttcttaaagtggatgtctctttttaaacatacaaaaggaaaattagcaggtcagagaattgaaccacattccatttatactgtttaaaagtttgttcatttcaattaatggaaaaccgtagagtttctatccttaagttgatgggcatggggtcggctcgctaactcggtattttagaacaagtatgttagaggttgtaagacaagattacatacgaacagcaagagcgaaaggtttgaaggagaagacggttatttataagcatgcattaaaaaatgcaatattaccagcaattacgttattagcatttgaattaccgggattgttttctggggcaattattattgaacaaatttttaactggccagggattggtaatattcaattagaagcattaaatttccgtgactatacagtattgatggcatttacgatgtttctttcttgtttaacaatcgtttcaaactttttagcagatatcgtatatgcagttgttgatccaagaattcggttgaagtaaggggggaaagaaatggagactgttacagtaattacagaaaaaaaagaaaaaaagagcagaagcgaatcatcaccatggcgacaagcttttaaaaagataaagaaaaataagatggcacttgtagggttttatgcattaatttttatgtttttattttgttttatcggtccgttcttttctccatatgcatcagggaaaatacaagttgcgctcattaacaaaccacctagtgtttctcattggcttggtacagatcaattaggaagagatattttaacaaggcttatgcaagcgggacgtatttcattaaccattggtttagcttcaatggttttatcggttatacttggagctttattaggagcgattgcaggtttttatcgtggtattgtggacaatattattatgcggcttgcagatattttaatgtcaatgccaggattaccgctacttattataatgggtgcgattttatcagagtggaaagtaccgtctgattatcgtttgtatgtcattatgattattttaagcctagtaggttggccagggcttgcacgccttgtaagagggcaaattttatcacttagggagcaagcatttatgcaagctgcggatgtgttaggaataaaagattaccggaaaattatatatcacttaatacctaatgttttacccattttaattgttgtatccacattaggtgttgcaggttctattttgggagaatccgcactaagttacttaggtcttggagtcgttccacctacaccatcatgggggaacatgattagcgcagctaactcattaatcgatttccaaaagcgtccatggttatggattccgcccggttttgcaatctttataacagttgtatcaattaatttacttggtgatgcacttcgtgatgcgttagatccaaagatgagacggtaggtgagaagatatgagtaaagcggtagtagagctgaaagacttacaaacacattttcaaactgacgaggggacagtaaaggctgtgaaccatgttagctttgcggttcgagaaggggaaacagtttgtgtagtaggagaatcaggttgtggaaagagtgtaacagctttatctattatggggcttattgctgaatctggtagtgtagtgggtggagacattttatatgaaggaaaaagtcttttaggaatgaaagagaaagaacttcgtagtttacgaggcaatgatattgcaatgattttccaagaaccaatgacatcgctaaaccccgtcttcactgtaggggagcaaattgtagaaacgttaagagagcatgaattacttagtaaaaatgaagcatataagaaggcaattgagttaattcgtaaagttggcatagcccgcgctgatgaaatcgtccattcttatccgcatgaactgagcggtgggatgttacaacgtattatgattgctgttgcgcttagttgtaatcctaagttattaattgcagatgaaccaacaacagctcttgatgttaccattcaggctcaaatattggatctactaagacaagtgaaagaagaatttaaaacgtcgattttattaattacacatgacttaggtgtcgtagcggaaatggctgattatgttgtcgttatgtatggcgggaaagttattgaagaagccccagtactagagatattccaaaatccaaaacatccttatacgaaaggattattgaaatcaaaaccagtaatgggaaaacgaatagataaactatattctattccagggcaagttccgaatttagttggtttaggtgagttttgttactttagtgggcgttgtgagcattgtatggaaatatgtgaaaaagaagccccaaatctaaatgtaaatgatgaaaatcataaagtagcttgttggttatatgaggagcgtgcggaacaatgagtgaaccattattagaggtgaaaaacctaaaggcatattttccaattaagggtggcgtatttagtagaacaattgggcatgtaaaagcagttgatggagtaagttttactattaataaaggtgaagtgtttggtctcgttggtgaatcagggagcgggaaaacaacaataggaaaaacaattttacgcctcgttcaaaaaacggagggagaagtgaagtttaaaggaaaagatgttcattctttatccaaggatgaattaagaaaacatcgccctaatatgcaactcgttttccaagatccatttagctcattaaatccgagaatgagaattggagaagcgcttggagagccaatgttggcccacggattagcaacgaaagaaaatgtgcgtgaaaaggtaattgaagtattggagttatgtggattagctccttatcatattgaccggtatccccatgagttttctggtggacaacgtcagcgtatcgtaatcgcaagagctatggtattaaatccagaattcattgtagctgatgaacctgtagcggcactagatgtatctatccaagcacaaattattaatttatttagtgagttacaggagaaaaggggattatcttatttattcatttcgcatgatttaagtgtagtagaacatttatgtacgaaaatcggaattatgtatttaggtacgattgtggagacagcaccgcgtgatgagttatttaccaatccgctacatccttatacgaaagcattgttatcagctgttccaataccagatccaacagtgaagcgagaacgaattatactagaaggggatattccaagtccagcaaatccaccttcgggctgtcgttttcatacacgttgcccatttgcaacggatgtttgtaaaaaaacagtaccagaattccgtaatgttggtgtagagcattttgttgcttgtcatcacgtataaaaaaggactctttcaaattaatctgtaccctttgtaaaggacattttgaaaaaagttaggcaacatcaagaagatggtttctgtatccaacaggagtcatcttttttaaattccattgatatctataatgattataatacgtcatatatttcttaataaggaaatatttgatgttttacgtacagatgtagttattaaatctgagttaggtggagaatttatatatcaatttgttaaaggaaatgacaaaacagatatatggattacattttcagagttaaatagttctcctgggctatatgcagagaatgaggaaaaaaccactaacgttatgtatcaggttgatatatggtcaatggcaccaatcaaaacgcaattaaaaagtgcagttcaggcagctatgaaaaagctgtcttttcagcgtttaagcacttatccagattatgaaatggatacaaaaatttatcgatatggttttcgttttgtaacggaaattattaattaaggaggaaaatgaaatatggcaatgacaatagattttagagatttacattatgcggttttaactgaaacatcagatggtaaatttaattattctacaccaaaacgaatcggtaaaacagttagtggtaaagcgtcacctaaagcggaatcagtaactttttatgctgaaggtggaccagcagcaacagctagtgcatttggcggtacagaaattgaattagaagttgatacattacctttatccgtttatgccgaattgttaggtaaaaaggttgtaaaaggtcaagttgtagataatacaagtgatgttcctccttatgtagcattgctatatcgtttaccatacgacaacggaaaaaatctatatgtatgttattacaaaatgaagtttgagcttccaagtgatgaacataaaacagcagaagataaaccaacattccaaagcgcaaaaattaaaggtaaggcaattcaacgttcggacggtaattggagacatcgattagatgaagaggaagaaggacacgatgcagcagttgcggcaaagtggtttaaagaagtaccagctccaccaatagaaacagccccaccaagtgggaagtaattaagaaaagggatggcgaaatgccatccttatttttattaaggaggaaacagatgatgaaaatcacattacaaaatacagaaggtaaaaaagatttttatttaccacaatttatcccaggttcagctacttttgaagcttcaacattagctgatgaattacaagcggacttagtaccaaaagaaacaattgaaagagctgctaattttgttgccagtgtgtacggaaatcaatttacagcacaggaatttgtggatggcactcatgtatggtttttaagtcttacaattcattctgtttgtttaacaattatggggcgcctaaatgatgcgattaaggtaatggaaacggtagaagatgcgaaaaaaaagttaatggcacaactagaaatgaaaccgacggaggaaaaatcaaatatagcgacgctgtaattgatatttataacatattgatggatgcaggtatgacacaaaatcaaatcaatgaaatggatattgcgttttactttacctgtttagcgagaaaacaaaaagcaaatcgagtgacaacagcagataaagtaccaatgtggttgtaaaggtaggtgagaatttgaatggcactaggagataatacaattggtggtcgtgtccgtttggatacagatcaattcgaaaatgggattgcaggcattaatagaagtctgaaaagaatagacgctgaatttcgtaacacgtctgagcagttacgtggagttggttcagagatggatcaactggagaataaggcaaaccatttaaatcaaaaaatagaagctcagacgcaaaaaatgaagcattatgagcaagctttgagaacttcacaacaaaaacaacaagaaatgcgtcaaaaatgtgagcaattggctacatctatgcaacaattagaacaagagatacagcaaagtactcaggcatacgggaaaaatgctcaagaaacaaaagatttgcaagctcaatataatcaattacagcaagaatacaaacaaggcacacaagctttacaaagattaacagctcaagtttctagaaatgatacagcatttaataatgcttcagcagctttacatcgatatcgtaatgagctaggtgatacagaagaaagaatagagcgattgggtaatgtttctggaagattacgcgagcgtatgaacgaagttggaaacagtatgcaagaaactggtacgaaagtgagccaggggtttggtgcagcagcagttggcgtggcggctggagttggagctttagttgtaaatgcaagtcaatttgaagaagcgaacaagaaggtacaatctggtttaggattaacaagggaagaaagtttaaaggttagtgctgtagccaaagaagtatggcgcgaaggctatggggaagatttagctagtgtcagtgattctttagttaaagtaaagcgcaatattaaggatattaatgatgatgatactttaaaacaagtaactcgtgatagtgaaatcttagcagaaacaatggaatcagatgtaaacgaggtaactcgtggtgcagcccaattaatgggacgctttggtttatctggccaacaagcatttgatttattagcacaaggttctgtaaagggtttaaactactcaaatgagctatttgataatttaagtgagtatggtcctttgttccatgaaatggggtttagtgcagatggaatgttcacaattctcattaatggttcgaaaaatggcgcatataacttggattatgtgaatgacgttgtaaaagaatttggtatccgtgtaaaagatggtagtaagtccacaacagaagcaatgggtcaaatgagtaaagaaacgcaaaaagtttggaaagcgatgctagaaggaaaagcgacttccaaagatgtttttaatgctgttttaaatgaattacgaacaacggatgatcaaattaaagtgaatcagttaggcgttgcacttttcggcgtgaaatgggaagaccttgaagctactactatgttatcactaaataatatggaaacaggtcttggaaactacagtggcgcaatgaacaaaatggtcgatggttacgatacaagcgctaagcaatggaaatctgtaacaagagaactacaaattgctctagaaccacttggtaaggtgattttagatatcgctaaacaagcgattcctgaattgaaagaatctgtgaagggtgtcgctgattggttcaacggattagatgatagctctaaaaaagtatatgggacagcattattactagccccggcagttatgggggtagttagtgcacttgggttcctttcttttggtattggtgcaattatagcaaatccaattgtcgcaacaattggtggagttgtaattggacttggtgcattaggttttgctttcgtagatgctgggaaaaaggcacaaaaagcagaagaggacagtaggcgctttggtgatggtgtaagtgaaggtacgaaaaaagctcttgaagggtatgtgaatttaaaagacgtttcttaaagtggatgtctctttttaaacatacaaaaggaaaattagcaggtcagagaattgaaccacattccatacaaattttcgtgtttagcaatatttatggatgggtgcaccgaaatacagggttacgtcgatttaaaaaggcatattggcaagtagggcgtaaaaatgcaaagtcacaatctttagcgtgcgtgggctcatatgaagcaatggcctttggtgagaatatgtcggaagtatatgttggtgccacaaaaacggagcaaagtaaaattgtttggaacgaaattaaagcgcaaatgaatgggtgcgaagacctaaaagaaaaattcaatattgcgtatgggaaaattgagcatctcaaaacagattcttttatttccgcgctctcaaaagatgcgggaaaatctggggatggactaaatgttcaatgcgggattattgatgagtatcatgcccatcctacctctgaaatttatgatgttctggtgtcaggttcaggtgctcgtccgaatccactcatgatgattattacaacagctggtttcaacttgagccatccttgctatcgtgtggagtatcaatatgtttctaagattttagacccgaacattgatattgaaaatgaagaatattttgtgatggtcaatgaattagataaggatgatgaaattacgaatcctgaagtctgggagaaagcgaatcctattttatgtagttatgaagaaggacaatcttttttaaaaggagaattgcaatcagcattagatgtcccagaaaaaatgcggaatttcctgactaaaaacatgaatcgttgggtggacatgaaagaaaatgggtacatggacatgcaaaaatggaaaaattgtaaagaaactgtggaattatccgaattaaaaggattggaatgtacagtaggtgtcgatttatcagcaaaaattgatttaacaagtatttcattcgagtttaaaaaggatgataagtatatcgtattaagtcatagctttatgccggaagatacgttagctgaaaagagacaaacggataaagtgccttatgatttgtgggtacaacaaaaatggattaccacaacacctggtgcggtagttgattatgaatttatcaaaacacatattagaaatatggaaaaagaccataaatttaagattaaagaaatatgtgcggatccttggaatgcaacgcaattcatgcaagacatggaagcagaagggtatacgatgatagaaatacgccaagggatggcaactttatcaggtcctacaaaagattttagagaacaagtgtatttaaagaaagtcatccacaataacaatcctgtattaaattgggcaacaagtaacgctataacaaaacaggatgcgaacgaaaatattatgttggacaagtcaaaagcaacagaaagaatcgatccgattgcggctgtcattaactcacatgttcgttgtatgctcaattctggtgaggtagacttaaattcctatattttaagtcaagatttctcattctaggaggaatgacatgcggtttttattatttttcatcagtattttagaagatattctattgattacggggttgtccattattgttgggacgactttttttatgaatccgatttacggctggtatctgttaggggttattctcacaatgttgggggtggtaatgataagaagatagaagggaggtgaaatttttgatttttcggcaattatttagaaatcaggatacgacagatttaaaaaatccttctccctggtttaaaagtttatttggctatcaagccgtaagcggtgaaaaggtaacggttgagtcctctttaggtgttccgacggtttatcggtgtattaacatccttgcaaatagtgttgcgatgcttccgtttcaaacatttaaaaagacagcgaagggaagagaacgggataaggcacatcaagtatcgtttgttctagaaagaagaccaaatccttatcaaagcccatttaaatttaaacatttaattgaaacacatcgtaatacatggggaaacgcctatattaatattcattggggtgtggatggaagaccaaaagaattatgggtattaaatccggctgttacaacgcccactgtggacttaaagaccaataaactatggtattttacgagtttgccagacggtacacctataaaaatacctgatgatgacataatccatcttactacattgtctactgatggtttaagggggaaacctcctattcaaattgcaagagagtctatagggagctcacaagcagctcaaaagtttaaaggtaagttcttcacaaacggggcagcgcatagtgggatattaaaaacagaacaaccgttaaatagagaggctaaaaataaacttcgtgatgcctgggaagaagcaaatacaggtctaaataatgcgcaaaggatagccattttagatgctggtttagaatttgagaaggttggaatgcctttaaaagatgcccaatttattgaaggtatgaaatttgataagggcgagattgcaaatatctttaatattcctttgcacatgattaatgagttagatcgtgctactttctccaatattgagcaacaagcgttggattttattcaaaatacattgagtccaattcttattcaatatgaagaagagttttcttataaatcattttcgtttcatgagcaaaaacgatattacttgaagtttaacctaacaagcttattacgtgctgattctaaatcacgagcagaattctacaaaattatgttagatgctggtgcattttcaattaatcaggtgctggaactggaggatatggacgggattggggaatacggtgataaacaccgtgttgacttaaaccatgtatctattgaaatcgcagacgaatatcaattggcaaaagctaatggaggagtgttacagaagggagatgaggacgattaaagacgtatttacaattaaaaatcaaacagattcttcagctgatctattcatttatggtgacatcataaacaataccggatggaaatgggacgattccgatgtgatgccggatgatgtgaaaaatattttagggcagttggatgataaaagtaatttaaatatctatgtaaatagtggtggtggttctgtattcgctggtttagctatttataacatgttgaaacgtaataaagcgcaaaaaactgtttatgtggatggtgttgcagcttctatcgcttccgtaatcgccttggctggtgatcgtgttgttgtcccttctaaagtatctcatataactagatactcacgggtttataggtaaatccctttcctaaaaaacctaactttatcatacgaggaggtgatggaagtggattggctacagattaaaaatcaagctgaagatactgcttctctttatttttatggtgatatcgtttcttcttggtggggtgcttgggatgatgaggaccaatatcctgagaatgtaagaaatatccttgatagtgtaaaagggaaagacttaaacatctatataaatagcggtggaggctctgtttttgcaggaatggctatttataatatgattaaacgtcacgaggggcataaaacggttcatattgatgggcttggaggttcaatcgcttctgtaattgcatttgccggggataagttgatcattccttctaatgcatacttaatgattcataaaccgtggaatggtatatatggaaatgccaatgattttagaaagatggccgatgacttagatgcaatagaggaagggatcatcaatgtttataaggataatctaaaagagggcgtagacatcgaagtaataagagaaatggtgcaaaatgagacgtggctaaacggtcttaaagcaagtgaatattttaacgttgaagtggcagaagaaaatactgcggttgcatgtacaagtaatctgtttaaggaatacaggaataccccaaaggcatttaaagagccaagaagagaaccgatgcaaaaaagtgaagaagaaaaaattaataatttgatgagagagatagatttaatctaactctttttttattgctcaattttaaggaggaagaaagatgccaaaagaattaagagagttattgaataagattcagaacaaaaaagcagcagcaagagagttattggctcaaaaaaagcttgaggaagcagagcaacttacaaatgaaattaaggatttgcagaaggaatttgatattgcatctgctctttatgaagatgaaaaaaacaatattccaacagaccctattccacaaccacaaaataatacagtaaaacctgctgatgcatttgttaatgcaatgaaagcggctgtagggaaacataaacttacagatgacgaaaaggaagtattaaatgcaactacaatgacagaaggtgttccatccgatggtggtttaacagtaccaaaggatattcgaacagctatcaaggaattacgtcgtagtgctccagatgcacttgagaattatgtaaatgtagaatctgtatctactcttactggttctcgtgttattgaagtagaagcggactacattcctttcgataatattgatgaagcggcagactttccagaaatggaatcaccaaaatttgaagatattcaatttgctgtaaagaaaaaaggtggaattttaaaattctctaaagaattactcgcagatacagcagaaaatattcaaggatatgttaggaaatggacaggaaaaaaatcaaaagcaactcgtaatgctctgatattaaaagcaataaatgataatttcggtacaacaaaggttccggttagtaaggtagatgatttaaaggacattttcaatgttaaattggatactgcgtttgaaacaacggcaattgccatcatgaatcaagatgcttttaattatttagataaactgaaagattcagatggtaagtacattttacaaccagatccaacaatggcgacgaagaaactgttatttggcaagtatccaattgttgtattaagtaataagacgctaaaaacagatagtaaaacaaagaaagtaccaatgtattttggtgatttaaaagaagcgataactgtttttgatagagaagcattatttattgaattctctgagcaagcattagatttatgggggaaagatttagttggtatgaaagttagagagcgcttagatgttaaaccagttgataaaaaagcgttagtagtgggagagcttacattagcagaacaaacacaagcataagaggggatatcccctcttttttaggaggggtttcatgttaatagatttaaatttggcaaaaaaatggctgagattagaagaagaggatatagaagaggatgatatcttagagcttttaattgataatgccgagatatatgtaaaaggatctgtaggtaagcattacaatgctactgaggataaccgaaaacaagcgcaaaaaatcgcattagttttaatcacaaattggtatgaaaatcgtgatttttctggtcaagtagatgaaaaagtacgatataccattaagagtatggtattgcaacttcaattaagtgaggaaacagcatgaatccaggaaaaagagataaaagaattatgattgaacataaaactgaaaggaaagacgatgagggaaacgcgctaccagcaggctgggaagtcttttctaaagcgtgggcgaaggctgaaactcccgtaggttcagggtttaattctgaagtttttaagggaaatgcagaatttgttattaagttaataaattttacaattccgtacagaaaaggtgttcattctgatatgcgtgtgaaatataaagggaagctttttcaaattaaatcagtgattgatattgatgaaaaacacaaagatatgtgtttaatctgtgaggagcgatctaattggcagaattagaggtcttcggtatagaagaatggattcgtgaattagaaaatttaggacaggatgtcccaaaaattacaaaagaatcattaaaagctggtgcaagggtatttgaagagaagttggaatttaattctccagttggccccgaacctaataaaccaacactaaaacaaccgtggtgggatggtaaacacgcgaagaacgctattgaagaaggaaaggttgtaaaaaaaggtggttcttatttcattgaagttggatgggataaagcggatcgctctcctcacttttatatgaagtttcaaaactgggggactagtaaaaatccaaatcctccacataaaggttttgcagaaaagactttaatccaaagtgaaaaagaggtcttgagagttatggaaagagaatttatgcgtagagtgacaggccgatgagaaattttaataaggaaatatttgatgttttacgtacagatgtagttattaaatctgagttaggtggagaatttatatatcaattatgtcttttttaagcaaataggcctttgataactttaaacgtttatattttttagttgacatattaccgcaggtctaaatttgactatataaattattttaaatctttatcagaaattggaaaaatatataatagttatgtgtggttataagtgaagcttatgaactcaatgaatcataatattaatttatataaaaaaactttaaaaaatcgaaagaaatatgaattacctgccaatatatagtgtaagacaaaggagggctggaatatgaagggtgaaatagattacgcacatttaatccaattaactttatcaggaaataaagaagcatatagcaagttgtatgataaaacgattcaagaaatatataaaacagcacattttttaatagaggataaaacggatgtagatgatgtcgttcaagaaatatacatacaactatatgaatcgcttcgtaagtatggtagcgagaagccatttcgtccttggctaattggacttgcgattaaacaaattcactcttatagaagaaagaggtggatgcgactacgaattataaaaaaagcagaagagcaaagaaagtcagtgcaaattgatttttctaacgatgttgtaagtaaaatatcaaaccaaaaactaattgaactcattcataaattaccgtataaattgaaacaagttattatcttaagatacttacatgattattcacaagaagaagtagcacaaatattacatattccaattggtactgtgaaatctagaattcatgcggcattaaagaaactacgtcaaaaagagcaagtagaagaaatctttttaggagaggtagggaatgtgaaatgagtttagattgtagagttagggaatctatacaagaagaagcaaagggtattgttgccccgccggatttaaaagaaaaagtaattgtacaaataaaaatgaagcacgggcggagtaagaggaagaaacgccttatcgcaggagtacttgcagcagctcttttaatcccgacgacaggttttgcgtaccaatctattatggcggatggtatatatggatcttttgagaatttaaaaaacatgccggagcaatgacattagaaacgtatatgcgttttaatgcaaaattatcagaagcgaaagatgaaatgggttcgaaggaatatgaagagtttacaaaagaactgaaaaaattaactaatgcaaagtttgcgtacggagattcgaacggtaatattgattatgatcaattattaccggctaaaaaagaggaattgaaaaaggtggtaatggagcttcatccgtattttgataaattaaatggccataagtctagtaaagaggtattaactcctgaagagtatgaacaatatatggaagcattaatgtcatatcaaaccgttttagtaaaaacgaaatcgagtggggggataacaatagaagaagtacctgaagcgtacaaagaaagatttattaaagcagagcagtttatggaatatgcaaatgaaaaggtgcaataattagaaaagctcatagccttcttagctttgagcttttttattgaaacaaaaaagagtgttcaattatactttttcatatttgcattatctttttgtataaaacaatctaaaagggaataaccagctattaaactaattatcgtaacaaaagttgtatttattagaataatattaactaaataaggtaggtattctgcaagtggtgaaaagagtagtgctggggaaaaggaaatgaatagtgtaggcactgtaatagcaataaatttatccggttgaaagctccagttttgtttacttgtttcgcgattaatagattgaaggaatcgtaataaaatgccaactataagagggaagagtgtaaagtagaataatcttggataaacgttaaagttcacttgcgtgtctgtatctaaataaaattgaatttttactcctacaaataataataagacgataaataatgtaaagcagaggtatagcatcactttttgcattatattccaccatcctttactcaaaatatattcaaaaaaaagaagagatatacaataactactgttgtatatctcttcttttactgttagttaatagtggagtttgctttttcttgcttcgtgaaataatcaataatgcccattgcactaatttctatatctagatgtaaaatattataaacggaatgatctgatggaacgtttaactttgtaagatgagaagatattttatccattaacaaagtttgtaaagctttagtcgcttcatcgaaatcattatacttttcaaagacttccttaccagtctgaacgaaaataggtagccaatgttccagttgattgtatacttctgtaacatgagaggatgcgccgtaatgaccgaaataaatagtatctacatccatactttgaatatgatttttagaagcaatcatcgcatctggttgaaattgtgaaggggacgttgatggtagatacagttctacaccaacgtttgcgagttctctataataaattccaattgtatcaccagtgaaaatcccgtttgttaatgaatcgtgaatgctaatatggtgcttagcatgccccggtgtatcataaaatgtaaggatacgttcttcggcaatttttaacgtatcaccatgttgtacaatacgaacacgttcttcttctataggaagaattggatcaaatagtttatcaaaatcttctttgtatacagcttttgcacctaaaatgagttttgttggatcaatcatatgacgagcaccacgagaatgcacatataacgtagtatttgggcacttctccatcattaaaccagctgcgccagcgtgatctaaatgcacatgtgtaacgataatgtttttaacatcgtttaaatcaatatgtaattgttgtaagccgtctaaaatatacggaagagaaggggctgcacaagtttcaattaaagtaatatcgtcacctaataaaacgtacgtacctgttcgttcattatgctgtaaatcgaaatcatcaataagatataggtgagaagataattgctctacttttttcatatttaccactcctcgtatagtatgtttaaacttaatttttttactttcatgagagacctgtaaaataactcttggacgtctcaagatcatattatatggttaagtcctcgatctattagtattcgtcagctccacatgtcaccatgcttccacctcgaacctatcaacctgatcatctttcagggatcttactagcttacgctatgggaaatctcatcttgaggggggcttcatgcttagatgctttcagcacttatcccttccgcacatagctacccagctatgcccttggcagaacaactggtacaccagcggtgcgtccatcccggtcctctcgtactaaggacagctcctctcaaatttcctacgcccacgacggatagggaccgaactgtctcacgacgttctgaacccagctcgcgtaccgctttaatgggcgaacagcccaacccttgggaccgactacagccccaggatgcgatgagccgacatcgaggtgccaaacctccccgtcgatgtggactcttgggggagataagcctgttatccccggggtagcttttatccgttgagcgatggcccttccatgcggaaccaccggatcactaagcccgactttcgtccctgctcgacttgtaggtctcgcagtcaagctcccttatgcctttgcactctacgaatgatttccaaccattctgagggaacctttgggcgcctccgttacactttaggaggcgaccgccccagtcaaactgcccacctgacactgtctcccgggtcgataagacccgtaggttagaatttcaatacagtcagggcggtatcccaccagcgcctccaccgaagctagcgctccggtttcaatggctcccgcctatcctgtacaaactgtaccaaaattcaatatcaggctacagtaaagctccacggggtctttccgtcctgtcgcgggtaacctgcatcttcacaggtactataatttcaccgagtctctggttgagacagtgcccaaatcgttacacctttcgtgcgggtcggaacttacccgacaaggaatttcgctaccttaggaccgttatagttacggccgccgtttactggggcttcagttcagagcttcgcttacgctaacccctctccttaaccttccagcaccgggcaggtgtcaccccctatacttcgccttacggcttcgcagagagctgtgtttttgctaaacagtcgcttgggcctattcactgcggctttccgttaagaaagcaccccttctcccgaagttacggggtcattttgccgagttccttaaccagagttctctcgcacaccttaggattctctcctcgcctacctgtgtcggtttgcggtacaggcaccttttatctcgctagaagcttttcttggcagcggggaatcaaagacttcgctccataaggagcttccccatcacagctcagcatacgcgataagcggatttgcctacttatcagcctaactgcttggacgtgcacaaccaatcgcacgcttcttctatccttctgcgtccctccattgctcaaacgataaagaggtggtacaggaatatcaacctgttgtccatcgcctacgcctgtcggcctcggcttaggtcctgactaaccctgagcggacgagccttcctcaggaaaccttaggcattcggtggacgggattctcacccgtctttcgctactcataccggcattctcacttctaagcactccaccagtccttacggtctgacttcactgtccttagaacgctcccctaccactgataccattggtatcaatccgcagcttcggtggtgtatttagccccggtacattttcggcgcagagtcactcgactagtgagctattacgcactctttaaatggtggctgcttctaagccaacatcctagttgtctaagcaactccacatccttttccacttaatacacactttgggaccttagctggcggtctgggctgtttcccttttgactacggatcttatcactcgcagtctgactcctaaggataagtcattggcattcggagtttgactgaattcggtaatccgatgaggacccctagtccaatcagtgctctacctccaagactcttacacttaaggctagccctaaagctatttcggggagaaccagctatctccaggttcgattggaatttctccgctacccacacctcatccccgcacttttcaacgtgcgtgggttcgggcctccattcagtgttacctgaacttcaccctggacatgggtagatcacctggtttcgggtctacgaccacgtactaaacgccctattcagactcgctttcgctgcggctccgcctcttcagcttaacctcgcacgggatcgtaactcgccggttcattctacaaaaggcacgccatcacccgttaacgggctctgactatttgtaggcacacggtttcaggatctctttcactccccttccggggtgcttttcacctttccctcacggtactggttcactatcgatcactagggagtatttagccttgggagatggtcctcccagattccgacggaatttcacgtgttccgccgtactcaggatacattcaagagagaacgaagtttcgactacggggttgttaccctctacgacggacctttccaggtcgcttcgtctacctcgttcctttgtaactccgtatagaatgtcctacaaccccaagaggcaagcctcttggtttgggctatgttccgtttcgctcgccgctactcaggaaatcgcatttgctttctcttcctccaggtacttagatgtttcagttccctgggtctgtcttccttaccctatgtattcagataaggataccataccattacgtatggtgggtttccccattcggaaatcttcggatcaaagcttacttacagctccccgaagcatatcggcgttagtcccgtccttcatcgactcctagtgtcaaggcatccaccgtgcgccctttctaacttaaccaaactaaaatataacttcgtaaccgctatttagtaattctacacatgtatgactaccaatatatcctgctccacctgttacaagtattgccataattatagtcctccatatttcattcattataaacttctcaaagtatatcacatatttcttatcctatgtttaacatgcgaacacagaaacttacattttatcccataataattttataacatatacgattctaatcaggtaataaaaaaatgccacataataaaaattatgtgacgtttttttattaaattacgtaacaatatacacttagaaaatgcgcaagactacctaataatacaaaaacatgaaaaatttcatgatgccccatatatttaaactctaaccattttggctttgttccataaataaatccaccaattgtataaaaaatgcccccaagtactaagaaaataatgcctcctgtacttaaattctcagctaacggtgcaaagaataaaacaattaaccaacccatcgtaatataaattgctgtcgataaccaccttggacaactaaaccaaaacatcttaaatacaatgccacaaatcgcagttgcatagactaaacaaaataatagcaaaccacttgctgaatttaatgtaattaagcaaaagggtgcatatgtacctgcaattaatataaaaatcatagaatgatctagcttcctaaagaagtatataacacgttcatttgccacaacactatgatatacagctgacgccgtataaaggaccatcattccaataccaaacaaaataacagctgtaattgcagcaaatgatggcatcttgatagaaactttcacaagcatagctaataacgcaataaatgataatatcgctccacctaagtgagtaaatgcattaactggttcccttacataagtattcataataacacccctcatataattacatgtagttttgataactacatgtaattatatacacatttctttttaaggtcaacatttacaattcatttgtttcgtaataccatatttaaagatatattaaacattaagttccactaagttataaaagtgagggattctacgtggaaaatataaatgaattacttaagacattacatttagaaaaaaacattaaacttgaggatattccaaatgttgacttatatgtagaccaagttgtccaactatttgagaatacttatgcagatacaacgagaactgatgatgaaaaagtattaacaaaaacgatgattaataattacgcaaaagggaaactattcatccctatcaaaaataaaaagtattcaaaagagcatatgattttaattagcctaatttatcaattaaagggagctctctccattaacgacataaaaagttcattagaaactataaatgactccttattaaatgatgattcattcgaattaaatacgttatacaaaaattatcttgctcttactgaaagcaatgtcgaaagctttaaacaagacgtaaataaccgtgttacagaagtaaatgagatttcttccttagaagatacaaagctagaaaaatttctactactaacatccttcgtgactatgagtaatatgtatagacgtttagcggagcaactagtggatgatttaaaagaatcataaataaaaaactatccacctattaaagtggatagttttttatttacttaattgcttcatgaacttttagttgtttccctttaatcgttgtagtcttcatgactttcaagataagtggtccttttccatttaatatttcaacgtaagaaacattatcttgtatcgtaataatacctatatcttctgctgtaacacctttaattttagcaattgtaccgacgaaatctaccgccctaattttctttttcttcccgccattaaagtacagcttcataatgcctttgttgatatctgcatttttatctttctttataattggtttagcatgtatcttttcttcaaatgcagctttctctttcataacttcttcttttgaaggtccaattgcctttggaatttcaaatccaatatactcctcaatctcttctaaaaatctattttcatatggtgttataaatgtaatagcttttccactatttccagctcgtcccgttcttccagtacgatgtacatagctttctttttcaagtggaatatcataattaataacatgtgtaatattatcaatatcaattcctctcgcagctacatctgtggctactaaataacggaattttccttttctaaaatcatccatgacttcaaaacgatcttcttgtaccataccaccatgtattttatcacaaggatagttagctcgttttaattgtctatatacatgatctacattttcttgtgtacgacagaaaataatacagctatcaggattctcaatcgttgttacatctttaagtagtgaaagcttctcgtcttctatcacctcaaaaagagtatgttcaattttatccgtcgtaatcccagctgctttaatttcaatatgaattggtgaattcatatatgtacgagacaatttctcaacatcttctggaagtgttgctgaaaataacatcgtcattctttttgtaggtaattcatcaataattgcctctacttgatcgataaagcccatatttagcatctcatctgcttcatcaataactaaatacttcaaacactctaaagaaagggtacccttctcaatatgatccaacacacgaccaggagtaccaactacaatatgtgtcttttgctttaattctaatttttgacgtgcaaatggagatttcccataaactgccgcagcctcatgcccatcaacttaaggatagaaactctacggttttccattaattgaaatgaacaaacttttaaacagtataatctctaaagaatgaagcgataaggcttctaaccgcaaggactgcggggttagcctaatcaattagagttcgatagaactatttacttaggaatccctcacttctaaacgaagtgaaagtgggggtagttcaattctcaatataacaactttaagaatatgatattattttaatgcaaaggcccttttgtgcaatgagatagtagtacccaaacaataccccactggtaccagtgggcttttcttttttttttacatttgttataatttccttaaaggtatttcaatgttgctgtacgtatataataaaagaagagatgcgtcaacatctcttcaagtaactgctaccgtaaggtgatcggttattaaaaattaatttttgcgttttttagaagaccgcccacgctttgctggcttaggggtggtcttcttctgttttttagaagtaacttttttaaatccaaaaactgcgatctctcagacaatagttttggatacttctaataatatttgaaaaagaatgtccattcggtcacctcctttccctataaataagagaaaggatcgcaaccaaccaccctacaatatatagttgttcttattctatcatacttatacaagctcaccaatataaaataacccacctatttccgtaggtgggttttatcttcattacacaatatcaaattatactctctttttctcgtaaactttatgcaattatacatattcgcaaaaatatactatataaatattacatgtagtaaaatataaattgtggatacattctataaagcagattcttttgaaagacgtaacatattgatctcaaatctcttgatattttgtgaactaacaatctggtgtaaatagaagattctgttttataggatgtgtttacacgtataacaaaggggtaatacgtgtatatttatataaaattaaagtggttcaagtcggaggaagacaccttagggtgtcttttttttgtacattaaaaaactcaccattcaacagaaaaggcgagatccttatatattatttcatatcttgttttctctaatgcttttcttcttaattaaccaataactgcattatacgttatataagctaaaatgtctgaaaggtttactctgataagatccaaatgactacaaatattcctgtaactgccgcacctccaagaaatcctaccaatatttttccatgagtaccattaacaatttcttttaattcagcttttgcttttttcttatcttctcctgttgaaaagagataactaataaaatatacgactactaaaaatagtgacgcgattacctctatcatgacttatgtacctccctaatatatgttaaccattaattaatcaataatttccttatacattatatcagctagggtacatggaaatataacaaattatttatataacttattttatgattatgtttaaaaagggatggaaatattccttttgctttgcaacgtatattaagcagcattcaaaatcatatatagattaaaatatgaataaataaagtgtggctaaaaaatttcaagacaccaattcattggaacggtaaaaactgttttttgaataggtgtctttttgtattgagtagaatatattttctcaacaggaaaaattgtaattatctataagtattacttataaggataataggaaaatagaaattaataataaaggagaatgagaaatgttaacagtaatatctaataatgacctagctaaaataagcgaagaagatgtagatgtaataagggtaatggcgcatccggttcgattaaaaattataagtgagctaatgcattataaaatgtgcaatgttacacagttaacagaaatattgaaacttccacaatccactgtttcacaacatttagcaaagttaaaaggaattgtaatccgtgcagaaagaaaaggattagagatgcattattatattgataataataaagctcgtcagattgtagaaattttagggctgtaggttaaacatacgtaaaagtatgtttcgtttgattcaaatggtagaatagtagcagatcgtacatcaattggtgcatgggaaaagtttatcttatataatggtggagacaataggatatatgtattacaagcactaagtaatggtagatatatatcagcaaatggtggtagagaattaacagttactagttatgtagctggaagctgggaaagatttgttattgtatacttctaaactttgaagtgttatatatctaaatgataatggcatgtttagttggtataaatacctaatataataaagttttcagcatgtaatacaagtgtatattaacgtgtaaaagggctgcaaataattagcagtcctttttgcatgttaaataaggacttactgaggttataatgaaaagaaaaagaaccctatagggttctttttcaaggcatattaacagtaaggagaatcatgaaatgctacttcaaatctttattaggggaaagattttgaataagctcaacatacgtctatttttacataaatgtaatatatagtaaattgataatatttatacttactattaccaatattcaattaacatagttgacactatttgtatagtgttaattggtgcttagtacagtatacatttagaaatctaatagtagatttcatttgttaaaaaagctaatagatatattatttcaatttctaactaacatttaaacggttttaattgaaaatggttgtgtattaactcttataagccaataaaagtaaataaaataaacaaagaccctgtaataaatacagggccggatacagggttaagggaacgcatagtttcttaatatcatgatgtgtagcatcctcctgcgattagcaagagggtagctactgcccatttcgggtacgataggtaagaatttgatgttatctccaacttttcccccgcctcacaccgtacgtgcgactttcaccgcatacggcgttccatcaataacttttgtattattaaatagtaaatagattcatgttggatcgtagtttatttaccttctcaacctgcttatcactaagcataagctgtttcattagtttttcgataaggttcggttttgtagcatgaagcaatctgtgtgctaattcatgtacaataatgagatttctgtaattatcatcgccaccatcagcccgccttttcacatgatggcaacgtaccatttgggggtagaatgccatctcaacacctgagatttcacatcttccttgtgtttgagcgaagcgacgaatacggttatcattaaactcaatgctacggttgggaacaaaattcctttcaagataagcaaatgcctttttcatatgtgctgctttttctttgtggccgtactttacccgactttcttctgagtaaatggtgtgggcttgagaaaaattcatagcacttgaatgtgacacgttaccgatgggaattgcttgaataccaccaacattaaaagttttgtagcctgatttcttataacctttattacttccattatccgcatggaaataaaccttaccttttaacctattataaataaccctattagagtgataggtgattttgtgaaaacctttgtttacttgtgttgcaactttaaagtagtcatgcacaccacgaatataagcatttaattcagatacttttactggaatcgtattaatgcggatagacttcactttcttcttaatatttgcttgaattgatttcattgaatctttaggaatgtagctttgtgccacaaattttttcttcttagcaactgctttaaattcgattcctagaaataacgacttccttttacgaaggttagtaatttttgatttagattctgagatttcaagctttagattcttttcaatgtagtttttcaccgcatgaaaccatcttttagctgaattgtagctatttgtgaagattttaaaatcatctgcatatcgcacaataaagccttgttttagtttcgttttcttctgtaccctatatcttggtctgttatcttcatagtgtgtattcgttgggaagttatgccattgtgaagctacccaatggtctaagtcgttaagtacgacattggccaataaaggagagaggataccaccttgtggcgttcctttttccgctttaccttcacccacaatttcacatttcaacattttcttaataattgctagaacctgcttgtctcttaccccaatattccatagttgttttattagcttattatggttgatattgtcgaagaaaccctttatatcaatatctacacaatagtgaagcttattaatattaattaaaaagttggtacgagcgattgcatggtgagtcgatctcaaaggcctaaacccatagctatgctcataaaattttgcttctacaatcggctcaagaatctgtttgaaacactgttgaataatgcggtcaagcatagttggtattcctaacggtctactttttccatcagctttgggtatgaaaacccttcttacgctatcaggcttgaagttaattagtttttcacggactagatgaatgatttcatcatctgagaatcctttgtattcattaattgttatttggtcagtaccaggtgttttacttccttgattagatttaatagtaccaaaggcaagttttatatttctttcatcaataatgaaagaatataaatctttgaagttcccaccattttttgattttacatacagaccatctaattccccttgaaaattataatattgtggttgaatactacgatttgccattagtttgtttgttactctcctttataggatttcacctatctactcttactcgattccaaacatattcactataataattattttggtattgacttagggctatccctccactatgtttccatagtttcaacggtactatgcccctactctcatcacattgaactacatttcttctagtatttagcttccctgtagtgacagaacactcgcctataacgattaacatttctgtatgtgactttccacgttccgtaacctctagctgtgcatacgattttaggtccaacctctccacctgtcactttaacaataccatataattgctcccgattttcataatcacgatttttactcatcggtaagtgaccttgcgaacttagcaagaagtccatttctagacattatgggtatagatgggtacattcagttgttcgtctatccttaatggaattactaaccataatcgttttatagcctcccgccctatctaatacgacaagtacctctacttgtttttccacaactcgtaaaggagatgttagggtattattcaggcgacttcacctagcttcatacaataaagccaataggcgctttatcgcatgtaggagtatcagagtagacgcttcaagcttttgttggcagctctcatttcatctatcgagaatacagttatcataaacctttaataaatactgatttatgttctcttttcgtagttcaactacttatagagaaacgtgtcgcaccttgctctattgtgtatacttctttcttttttgctgcggcattgataccctcttcatttatagtgaaacggttgtcgatcatagtcattttctgattaaattgttccgttgcaagtttattagctaattcgcccaataagtcttgtttatttttatcaactgtttgcttcaactcaggtatcttaaacccagcaacataatcctctacttgtttcagctcaactttaccttgcagtgctttcgcagtattttcccaaccagctttcgcctcttgtaattgtcttccttgttctgtctgcgtattttgtattaatgagacattttgtttaatggtagttgcatctttttctacagtagcaacacgtttatcaaaaccattttgattattttccacttttgtgattgtttctttaattccatccacactttttgtaatttcaattgttttctgggtgaattcatccgttgttacctgttcttcaggcggcgctgtccaatcttgcggcttattccctttatacaaggcaacccattccacaatagatttcgtagtgctactcggatagttatataagcttaactttcgttcatttccacttgtagctgcaactgctttgaaggttacatacgttattccattcgcgtaaacacttgttgcatatccaacattgctagacccaccattctgccaaattccaaatttctgtccttgtgggacactccctttaattacaaaggtatattcttcacccgcaaaggaattttcagttagagtatattgattgattagatagtctgttttttcatatttaacatttgattttaataaaaggttacgtccaccagctttatcactattaacctttgtttctacactcgtcaacttctcactgattttcccagctttttcttctatttcagtagttgttttctttagttcacttgttgtttgttgcacatcagaaatactcttctttgtaccttctacagttgtttcaactgtatttaatttattgctaatgtcagtatcttttttcgttaacgattcaatagaagttttaaatccattagaatcctgttcaaactgagttactttcttatcgatttcaccttgtttattttcgatattagaaattgtacgactgacaccttgtaaaccttcctgtactttattaaattgtcctgtagcttgattctgtgcttcttgtaccttttggtttaattctgtttttgtgacctcaatatttttattaacctgctcaagtgtttctttcttaactgattcaacatctggtacaaccgattcccaagctgtacctgtccatatttttaaaatgccgggctttccgttactaatatcacgccaaagcgttttattaggtttaagacctgttgtcggtggattcttagcttctataatttcaacagtattatttttaatattctcttgtaccttttcggcaagtgttttcgctgcttctgattctttcttagcgttacttgctgtttcattcgcttctttcaccaatttatctagctgatccagcatttcttgtttctcaccgaatttactaaggattcggttgtaaatcttccgtaattcctcgttttggtctactatctctctataatccccaaattcgtatttatcttgttcaggatccgtaaaagattcatcaccggcaattacacgtgcttccaggtataacttaggtgtgaagcctgtatctttgattcggattgtatctccttcattgattagttcatgcgctagtccgaaaattcgaccgattgattgtgcctctacttcatacgaaactgaagaattaatacgttttttcagttctatttccattaacgtcattaaacgttgtggcgtcatatttaactcttctgtttctggcgtataaaaaccaaacttatgcttaccacgttcgttccatcgttgaaatgcatcattatcgacaatatacggaagtcccctgttaatactttcaatagtgattacactatcgccttcaccttttacaaatccgactaacgctgtacaaatatctcttgaatgttcaatacgtgtaacacctatcaaatctttacctaactctatttctttgccagtgtctcggccacgcctttgaatcatatcgacataccatccaactatttgtgacccttgaacctcaacacgatattgaatttctaatttgaacaaagaagctattttcttcaaaaaggttaacggatccataaattcatcaatggtcatcgtatggaatcctgcataatctgtttttccacgtttccatttcatgcctacaagagccatatcgataaattcgtttactgttttaccttctatcctttgtggttttataatgcctgatttagcaatttgaacccaagctcctgaagcatatgtggtaatggatcgtttatctgaattcttctctgtttctgtaatgacatatggtacaactcttccatcgcgaacttcttttagaacaagattttgttgttgtaacgtagccgaatgagttgttccatcaaagacagcaaaatccaacatatcaacattgtttttcagttcccaatgccttttgtcatcccaatagtcatttgactggatagctgcaacgatttgatctgttttaaaatccacaacatgcaaaatgccgcttggtgttctcatctatatcttgtgcgacacgttcctaactgaaaaggttaggcgctgattcaatattcagcagaactattatttcgagaagtcaaatgatagggtaacgccttgaagggcttcctctgatactccgacatgcagcatacaaaagataagcctgtagttgtgtgaagctcggtgaagtcggctgagagctaccgttaaagtatctcgatactacgaaaactgtccagcggtggatggtgtagcctataggccgggagtctaaaaagcactcatgggtagaatggattcaacaaaaccaacgggtaggcagaatctgacgaatcttcgaatgtacgggtctagaacgatgacacatagaaatgtgtgtgccacgagcgtggtgctgatgtggatgagtaaaaatagttgttatgaaagtccatatgtcgttataggcgacatcaagtcagtaggcttaaaggagaaccctaaaagtgttatgcatagatagaaataatggaacgtggaaagccaccaacatggagaacttatcttcgaggaagtgtttgaagggaaggtgtttgtgagattagcaaacgtataaccttcatttatggtggtgagagtgatggcatagtaccggtgaagcaatggaaacattgcagagggatagccattagtctgatgaaagattgaccaaccgtttcaacaagctacgcagtcgaattataaggttcttgtgagactaaaaaaggtaaactctgaaaggagatccgacttataaagaaaactgaaaagcttagacacgctgaatattatgatatgcagtctacactagatgacttgtatcagcaaagtcaaaacggtaacaacttttataaattaatagagcttatgaagatggatgaaaacatacgtttagcatatcgaaatataaaaagaaatatgggaagtctgacagctggaacagatggaatgacaattaatgatattaaaatgctttcaacggatgaagtgatagaaaaagtaagaacgatgtttggttggtatgaaccacaatctgtaagacgcgtatttataccaaaaccaaatggagaccgtagacctttagggataccaaccatatgggacagattatttcagcaatgtgtattgcaaatattggaaccaatatgcgaagcgaaatttcataaccatagttacggttttcgccctaaccgaagtacacatcatgcactagcgagaatgaaatctttagtgaatagaaaaggaaacggatttcactactgtgtggatatagacattaaaggtttctttgacaatgtgcatcatggaaaacttctaaagcaattgtggacgataggtatacgagataagaaattactttctatcatttcaagactactgaaagcagaaattgtaaatgagggtgttcctcaaaaaggtactccgcaaggaggaatactaagtccgcttctatctaatatcgtactcaacgaattagattggtgggtaagtaaccaatgggaaacgataaagacctcacatccatataagggaaatagtgaaaaatatcgagcgctaaagaaaagcaaattaaaggaatgtttcttaattcgatatgcagacgatgcaaaaatattatgtcgtgattatgtaacggctttaaaaatgtttgaagcaacaaaagactttcttagaacacgcctacatctggatattagccttgaaaaatcaaagattataaatttgaggaaaaaagcgagtcactttttaggctttacagttaaggcaaataagaaaggaaacaaacatgtggctcatagcagaatgtgtgtaaaatccagaaaacatgcgtatagcaagctgaaaaaggctgttaaagatataagcagagaacaaacaccagaatcagtatggcgatttaacacgactgtaatgggaatacaaaattattattcagccgccacacatattaatcacgatctagatcacatgagttgccatctcataagaacactctataatcgactgaggcgagattggaaaaaagccactaagagtgacatgtcgactgtattaaggaaaagatataaacgatacaatcctaaattgtataaaatcaaagacatcgtattactacctatccatgcgcagaagcacaaaccggctagaaattttactcagtctatctcaaattatacaaaagaaggtagagagaaaatacatgatacgctaaaagccgtagatagggagacactccgacatgtacatcgtttttatatgaagcatcgaacagtagaatacaacgataacagaattgcaaagtttattgcacagtatggaaaatgtgcaattacgaaacaagaagttggattagtaggttggcactgtcatcataaaattccgttggaatttgggggacaggacaattatgaaaatctggtaattgtactagaagacatacacatagcaattcatagcgatgattcagataaggcaaaatcaatcttaaataagtacgacattattgaagataagaaagtgatgtttgacaagctgagaatatcagcgcgtcgacatcctatctttgcttcaatacaaaagttggtcaattgaattagatggagcgccgtatgaggtgaaagtctcacgtacggtgtgaagtgggggaaaaggtggagatgatgtcaaaaccttacctatcactattttaaaataaacattcgtcatttttgtgtatccaatatcactagcgcataagaggaaatcgattactgcatcgttcacattttttttatcaactatcttttttaatctttctatattctttttacccgtctctaacaaaattcctaaagaaattatccaaagcatatatatataacccactttgctagtccctgtatgctctaaatcatctatcgcattataaaaatatacttccattttactaatgtcttctcctaaagaatacattgccctaatatcgttcatctcatgtataaaattcgacaaataattttctaatataatacttttgttatcattaggatatctttgaataccatttttttcatcttcttctaaacttttaatctcttctctattttcttcgataaactctttatgatattctattccccttttacatttttcttctatacataaatgatctctcattctttttaattcctcctcgcttctagattatggccactctccaacgatgttaccctttgcatctatcttaaatgttttaacctttccactactatcaacttttgataatactctttcaactttacctctttgcaaggctttcgtaatctgttcagctaatacttaatctccctcaacagcttttaatattctactttttccagtttcagaacctttcaaccaatcatttgacatttgtcgtccatctttagttttccccaattgtgaactaccaaacttagcttcatctataacgtatttgatctttgattctgcatttgcattttcgtataatccatcaattccttttactattttatcatttatgcctgatggtgcactttttccgactggctttaaatcaaatccagcttcttttaaactttgattattcaataaattgtcactagattttatttcaccataattccctttttttctttttttcataatatttttcttggcttctacaacttttaattgatgttcatttaagtttctagcaacataatgctctctgctactttatcaacttgaaccataccctaaataaaaagcacttgttgcctttagtcgacaatcaagtgctataagtacatatttctgttacaagcgtaattaaatattttttgattattttaacaataattatctctttgtactaatattattttttcgcatagagaatttattcatttttaaaatgaaccatgtcataaggataataagaaatatcttttaatatactatcatctaatcctaaaattttcataattgctccactttcaaaactccaataaccaaaatataatttttcttaatgtttatggcattcataccataccatattattatgcccaacataccattgccctaacaagtattttttcatgaattcacaagattttgtattatcattacacaaaataacattaatcagacttttaaatggcttttcaaataaccagctatattttcgaactgtaatcacttcttaacaactactaatctacctctattatttgtatcccttctttggtttctggacaatcattaatgcttctttttaatactcatcttcaaataaacaattatatatagtaacacctgtttcctttaactctaacgaaacatcctccacttcaatacttaacgtttctttatcaagattctttattccgttactatctaataattttaaaatactacttcctattttcttagattcatcattgtatggcgaggactcttcaactagctcgattgtaccattagtgtatctatatcttaaatatttaaccactgcatatggcgcgattgccgaaatcattagcattacacaattaatttctgattgcttccgaacatactcactgaattctacactaccaaaacgaaatttcacatctagtggtagaagaatgtaagaaaaacatgatgaataactaaaatcagtaatattatcaacgtttatatttgatattttattaatttctccatcccagaaatgtttatcaacaaatttccccaaaacatattggaaatcaccttgtttatataatttattaacaacttttagtatctcatcactcataattattctcctttattgtacagggtatccatgtatatttcctttaccatccatatgaacctttaccctcgtttctccatttggacctattggttttccaaaatcatgtactctaacacttccatctggctttactggtgttcctttcacccatgcttcttgtgtctctactactccattcttccctgctccccactgcgatttggttgagacattattcccatgaccaggaacatgtttaccttgttttcctgcatcaacttttggagcccctgaaacgccagcatcaacatgtccttgacttgctagtttatcattttttccaatgttccctgctacactggctccctggccaccatcaccagtacccttacctccaccagaagactcgattctttgaagagtatccttagcattttgaatcgatttatcccatacaaatccaccatgtacaaaaagacttgccccagtagctgttgctgctatatctaatggaataacaattggtgacgctaatccgccagttcctacttctgcgacgatcgttaacaccaggtttaccgttactaatatctcgccatatcgtcttaccaattttaagattcgttgttggtggattcacagcctcgatgatttctactgtattattcttcaagttttcttgaactttctctgctaactctttcgctgctttcgactctttctgtgcttcatttacttttttatcagtatcttgtacaagttcttctaatctatctaacaattctttatttgctttatttcctaaagtagcgcgaatcctattgtacatttttcttaactcttcgttcgcatcagtaatttcatgataatcaccaaacacgtattgatcttgtgaaggatcagtatgtgattcatcaccaacgattgcccttgcttcaaggtataacttaggtgtgaatcctgtatctttgattcggattgtatcgccctcattaattagttcatgtgctagtccgaaaatacgtccaatcgattgcgcttctacttcgtatgaaacagaagatacacgttttgctagctctgttttcataagagtcagtaaacgttctggtgtgatgttttcttctgtttccggagtatagaaaccaaatttatgctttccatgttcattccaccgttggaacgcatcattatcaacaatgtaaggaagtccgttattgatactctcaattgtgataagtttatcaccttcatctcgtacaaaaccgacaagtgctgtgcaaatatctcttgagtgctcaatacgtctaacaccaactaaatcttttcctagcactacttcttttccagtttcttggccacgtttccttatcatatctacataccagccagtgatttgagaacctactacttcgacacgatattggatttctaactcaaataaagtagcgattttctttaaaaaagcgagcggatctataaattcatcaatagtcattgtatggaatgaagaataatcggtttttccacgtttccactttgaatccgcaagagcaatatctataaacgtattaactgtttcactctctatgtgttgtggtttaatgaacccatccttggctatttgaacccaagcgccagaagcatgtacagtaatcgttctatcattagattctttttctacttcattattgataacatacggaacaatacgaccatcacgcacttcctttaatactaagttctgttgttgtaatgcaactgcatgtgaagttccatcaaaagttttaaattctaacgtatcaatgttgtttttgatttcccaatggcgtttatcatcccaatagtcttttgattgaatgactgatataatctgatctgttttgaaatcaacaacatgaagtatcccacttggtgttctcatctaaatcgctccctatatttcacctttgctgttcctatatcggaaggtatgatttcaagtgtattaatacctttattgataacaggaaaattactaaaaatatcttttatgttaatagcgtttttcccctcaatactgacatgactgctttctgtatcaatcacgactttgtcaccaacatcgaatatataaggcggtgtattttgattatttaaattcactttccaaaatttcaaatcagaaactgacatcgcttctactggcggaacatcttgccactgcatgatactaatctgtatttgagctgctttttccatatgtttattgtctttatcggtccatcttgcaaagcgttctgaatcatctttttctgttccaggaagaaattttgaaatataagcctcccaatcattaccggttctagcgatccacaacctaccataatactgattccatgtattcggataatcaccactctcataaatcaaacctatttttccaggcttattatcatatccaattaccatcgttccaaaattttgttcagcttgccaatagagatcattcatggcaatttttgaaagaactttgctgttttcatcgagtatcgctatctcaactcgtcccatttcattgatctttttacttttacatgtaacgtgggcttgcataataaaatcttgtactggcccaccagggatactctttttaacagatgcgccatgccatccattacttgaaccatagtccgaacaatagaattggtaactatctgttttcatttcaccaactggattaccatcttccatagaactaaccttactccaccctacagtagtggacatatcatcccatataagacgctgatttctttctacaggcaattgttccatttttaatggcactccaatacggaaataatctggttcttttgaatatttatcttcaaaccatacatctaaaaaagtgtttggttttttaatatcaatttcaataatcggatttgaatgcacagagcctttgtttttaacattggcaattaaccctcgaccatcattttcaaaatcaaccgtttgctcatttcctaacttatacggcattggacaaataaatttcaaagtgccttgtccgatatctacaaatttatcaatatcaaaatcttcatctataactgccatatatgttctatcaggcattacatcaaaaatcagttctgctggattttcagtaataagccactccgctatttcttcttttaacgtttctaaattcgtcccatttggaacggcgcgacacgtttctctataagcgtttagacgtgaagtgagagtgttgctgaaatttatcttaagcaacaataactaatatatcgagagttggaatgaaaatcgtcatgttgaattgaaacaactccattaatactcctacatgcatgatttgttagtagacagattgtgtatgaagctaggtgaagtcggctgaacgagcctaagtgatttttaatcatatggtgtaggataggtcggatggctgaaaagataactatggtgagaatgtcccttatgggtctgacgaatttgcgaaggtacgggtctaaaattgcactataccgaaaggtatagcacacaagagtgtggtagggtaccgagaagtacgaatctgacggtaggaaatcgggataagcaacgatgagcttataaactctacaggcttatagcaaacacctacggttatcatgaatagctagatatattggaacgtgggaagcaaaaaactgctaaatgaaaacagctactactgggcaggtggatataaggtaattagccgaaattcctttatttttgtgaaggtaggggcacagtaccgttgaagcgtctaatgaacgtggagggatggccccaagtctagtttgttttatgtttaattttaagaaaatgaagctcaatggtcaggtaggaatgtgggcaaaaacctaggaggtttccacagttgagcacaacaatgagatattgggaatattacaatatgcaagaaacatttgataggttatatgaagaaagtcaaggaaataaatcattccatggtctatatgaattgattacttcggagaacaatattcttttagcataccgaacaataaaatctaacaaggggtccaaaaccgctggcacggatttgttcacgatagataattataaaccaatgtataaaaaggaattcttatcattggtttgtaaacaactagagatatacaaaccaaaagcagtaaagagagtttttattcctaagtccaatggagataaaagacctttaggaattccaacaatgtttgatcggttaattcaacaaatgattaggcaaattttggagccgatttgcgaggcgaaattttacgaacatagttatggatttcgtccgatgagaggaacaaaacatgccatttctagagtaatgtttttgataagcagaaatacttttcattacgcggtagatatagatataaaaggattctttgacaatgttaatcacacattacttctaaaacaattgtggaatatgggtattaaagataagcgagtgttaaaacttatctatttaattctaaaagcaccaattaagggatttggaattccaaaaaagggaacaccacaaggtggaatactctcgccattactatccaatatagttttaaatgatttagaccaatggatagcaagccaatggcactattttgaaacatcatatccatatacaaataatgcaaatcaaaagcgagcaatgaaaggtaccaaattgaaacaaggatttattgttcgttatgcagatgattttaaaattatggcaaaggatttccgaacggcacaaaaatggtttttcgcgacaaaaatgtatctcaaggaacgattaaagttggacatttcaccagaaaaatccagaataatcaaccttagaaaaaacaaatctgagttcttaggatatttattatatgtagtacccaaaagaaacaaatgggtttgtaactctaggatatcaaataagaaaaagaagcaaatcaaacttgagatcaaaaagcgaataaaagctattcagttgtcatcaactcggaaaaatgtgcaattatataatgcctatgtacttggactgcgtaactattttaggtatgttacacatgtaaatattgaaatgaaacagcttgcatttaacctatcattagtaatattcaatcgattaaaaagtgtcgggaaatatgaagttccaatcaatgcacctccggtgtttacaaaattctttaaaaataattatcgaacatttaaagtatgtggtatttacttatttccactagcggatatacaaacagcaactatatggaattacacgcaaacccaaacaccttacaatcaaaaaggccgaaagattgccaaacatattgagttaaataaattggtattaggcgaaattaagaaactactaactgcaaatatccctaatgaaagtatagagtacttggataatcgaatggcaaggtattctatgttgaatggaaaatgtgagatacttaaagaatttttaccagcaagtgagctacattgccaccactatattccgaagggattaggcggaacagatgagtatgaaaatcttagaatcattcataaagaaattcatagattaattcacatgacaaataaacaaacgattgaatcctactttcaaaaacactcgttgactgtggaacaagttaaacgaataaaccaatatcgaagagcttgtaatttagaaaaaattaaacaataaacaaattagatggagcgccgtatgaggtgaaagtctcacgtacggtgtggagtgggggaaaaggtagagataacttcaaatccttacctatcactaacagtgcgcccataagggggcaaggaaaaacggtgattgcaagctgttaggtcaaccctaaaagacctagtatcacttggctaaccttggagggaaactgaaaggggacaacagcatgccaagaaagccgtaagttggctaaacatcaagtcaagactgagcggcaagatataaagtatagataaggatgaaagctaaactgcttgaatgatagcacaagggaggccaccgtaactagtctcgaaagatgtttataaacgagattcaacagatatcataaagatagtgtgagtcatcttatatgaatagggttatctgttgcccacttctatatggaagaaaagtgtgaacgtcacatccgacactatacgtgcaaattccttgtttactaaatggggattgtctaagttagaatgcctgcgaggctattgaggataacttcaagatgtaacagtcaagaagtatggctcatgaatatctaatatgacaacggagccttcgtagtagtcagagctagggaaagcctagtacagggcgaaggaaggcagtctgttagcttattaccaaattggggaggtgcgaaaggcactatgcaatgtccaaaaatagtactaagcaatctgcgaacgaagagtcttaataaggaatatcaatatacaagactttatcgtaatttatataacccagatttctttttattagcatacgataatctaagtaaaaatgatggcgcattaacgataggagtagaccaaaggtctattgatggtttttctatgaaggaagtggaagacttgataagtgttttaaaaagtaaaagctatcaaccatatccatctagaagaacctatattgaaaagaaaaatggcaagaaaaggccattaggaattcctagcttttatgataaattagtccaagaagttatacgtatgatactagaagcaatatacgattcaagcttttctagttcatcacatggataccgaaaaggaaagggatgccatagtgcgttattagagataaagcgcacatttacaggtagtaaatggtttatcgaaggagatattaaaggatttttcgacaatattgaacatcatactctagttacaattcttaaaagaagaataaaggatgaggcgtttatagagttgatctggaaattcttacgagctggatatttagaagaatggaaatttcataatacctatagtggagcgcctcaaggtggaatcattagtccaataatttcttatatttatctaaatgaattagatacttatatgaaaaagtatcaggatagatttgaatcagggaaaaagcgacaaataaataaagagtatagtaatttacagtataaagtgcggaagattcaagagaaaatcgatactgcctatctaaatggagaagtaacacgaattacggaactaaaagaacaacaaaaagttttgaaagggaagttgttacaaacaccttataataatccaatggatgaaaattatagaaggctcaaatatgtaagatatgcggatgactttcttattggagtaataggttctaaagaggatgcaattcttattaaaaatgagatagcttcatttttgaaagaagagataaaactagaattatctatggaaaagactctgataacaaatgccttcaagaaacacgctaaatttctaggatttgaaattaaagtgtttaaaagtgaagcaacacgcattaacagtcttgggagagcttctagggttcttaacggtaaaattcaattgaaaatgccacatgaggcatggataaagaaacttcaaaagtatcaggccattaaaatgtgtgccgatggcacttggaaacctcagccaagaggatatttccaacacaatgaagatttagagattatcacgcaatataatagcgaaattcgagggttatacaattactatcgactagctgaaaatgtgagcaatcacatgcaccgctttgcatatttcatgtattattcaatgttgaaaacttttgcgtcaaaatacagaacacgtacgaaacaaattcgagagaaatacgaaaagtacggacaatttactgtacagtatgagacaaagaaaggaatgaataaagttcatttcattgaaagaaagtttccaatgacaagaaatttatcactagaaggaacagacattttaccaaatactcggcatgtaatgagtacgactaaattgtcagatagaatcaaggcggaaacatgtgaactatgcggaactagcaatgttgtgatacatatgcatcacattaagagattaaagaatctacgagcaaagtcaaataaatcatatcttgaacaacaaatgatagcgagaaatcgaaagactatcgcactctgtaaagagtgtcatatgaaaagacacaagggcgagatataaaatgcagaagacagatggagagccggatacattgagagatgtaagtccggttcggggaggaacatttggaaacctatcacaggaatgtaataaggcgctggatgtttactctacacatgtctttttttagtaaataggcctttgataactaaaaattcttttgtttttcagttgacatactaccgcaggtcttaagagaacagtctacgcaactgttctctttccttttttaacaaatataacaggacaagcatagttaactatcctacgatcgattgcattgcaacagtctcaacgtttcctcaacaatttctcaatatttttcatggacaatagcacacttcctcaccgttattaatatcttaatattaaatactgaaaggaggtgctaaaaaatgacttggttcattattttaggatttatgcttattttaagtataggcaacttttatacacatagtattcatatcattttcaaaatagattcagatacaaaagctatgccaaattggtctttcgttaataaaataaactttcaaacatttaaagaattgataaaaagaccaaagaagaataaactcaacagccttacaataggagaactgtttattcctttaagtatatttaataaattatttggcaaaacattaatttttctaatcctattcttctattctcaattcttaaactaaatataatatgagatgagtaaaagaatagcagtcgccaaccataacaaacaacagaccgcctattacagacggtctgttttaaaacaaattgactatatcaacagaataaggacactttaaatattcattatattcttattattaatgaaaaaaatggtagtaataagtgcattagcatatagcacgaatagtttacatgcacctcaacaatcttctaatggtggaaatacaccagcaccaacaattcctagtgtctctgtagaagtatctattaattaatgtaatatatttttctcagttataaaatcagaaaattcaactttttataaaaatgttgaatacactggatagaatattgaacccttagtccgaaacaaatttatttcggactattcacgttactataattgtacgtagaatgatagactaaaacttccacttagtcttgttctgtaatttcttctcattttgaagtaaggcctttaacttttttaaataatcgatttccatacgtaagcattcattttcatcttttaatgtctctatccccccttcaatagttgcattatttaactttgatcttgtcttttccataactgcccacctttcttctttttatatgagaattccacgccttttaaatcatatatttccctttacctactaactattccaataaattctttaacacaagcaattcatttatttcatttgtttttattttatttctcagaatttcaaatatatcttttgaaaaacccctggtattccattcatatttatctctcctaaataaatcgtaatacacattatacccaacaaatttataagctttaatcttatttttaacaaaaccttcataattttaaatagacataacacttcatgctgtcaattccccctatattaataaatatgaaacttctaatttatttgacatttcaatgacttatgacaggaaaatatatacatttaattaaacctaatgtatctttggtttgtaagtcttagttagttggccaacttttaatacaatttaataattacaaataagggggatttaaaaatgaatcaagtattaaggaaaagtaagaaaaaaatgatgtatctagtcggttcacttctaatttctctatcaatgttttcaactacaagttttgcagctacagaaggtgctgtaaaaagtgttacaaatagtaattatactggaattgcagctgatataaacctaccaaaatcagttgttgttaaggatggatatgtgaattggtatttaggtattggagcatctaaagttgaaggtggtatttcaaaaacaccaagtggatataaagtatttcttaattcaggatataatgaatcaggtcaaaacaataagtattggaacacacaatatgatacatcaattaaagatagtgatcgagtaaaccttaaaataattaataacggcaatggtacggttactatgtatgtaaatggaatccctagatatacaaatcagcctgtatatggctcattttctcaatacgaaccagtaaaaatggttcagggcgttgaagatactggacgtaattcttttagccaagctagcttttcaaacgtacttctaagagaagatacatctggatctatctacaagagttggaacagttctatttcttccacattttctaaacatggtacttatagtaacaatttcacagtttattctcaagtaccattaagcgcaagtttacgctaaggttgctcttgtatacgaatgatgttctaaaaaaaggtagctgtactttttaatctgtaccctttgtaaaggacattttgaaaaaagttaggcaacatcaagaagatggtttctgtatccaacaggagtcatcttttttaaattccattgatatctataatgattataatacgtcatatatttcttttatttcgtttgtcgcttgcgacgttattgtcatcggcgacttgttctatattacacctctaaagtataatcgtcaatacgttttttaaaaaactttatattttatagatttcacttatgtatttcttctatagttatatacaagcaccccacagaactatctatggggtactactctattataaaaactattgctctttcgacggcgccgaacaacttccatcagtacaaaaaagatcgcttccaccctctgaagaaagttcttgtaacttaggtgcaggattctcttcttcccacacttgctgaagtgcaccaacaaaagtttcaagtggttgtgcacctgaaatagcatacttttgattaataataaaataaggtactcccgaaatttgatattgctgagcaatcgcttcatcaattctaacatcatttgcatacgcatttttatcattaataacatttaaagcctcttgcttatctaaacctgaaacttcagcgatagtagcaagtgtatccacatcacttaaatttctcgattcagtgaagtatgcgaaaagtagattttccgtaatctctttttcttttccttgatcctttgcaaacttcgcaagacgatgcgcatcaaacgtgttcgtcggcttcatctcatcaaaattaaaacttaaacccatactagctgcatgatttcctagctgtacgttattacgcttagcttcttcaatactaattccatactttgatgcaagtacttcattaatacttgtcccagaatagattggagcattttgatctaattcaaaagttttaaactcaacttcaacatccttcttatgcggaaattgctctaaagccatctctaatctacgtttcccaatatagcaaaatgggcatacaaaatctgaccaaacttcaattttcatagaaacacctcattaacttttagttttcaatcattgtagcactgagattaaggaattcaaaagtttttgctctacctccttcatatagtacatacaaaaatacacttatagcagaatacctaattaacaaaaaaacgataatcaaaaggattaaccattatccctccgattatcgtctatataaatgcaacaactttaattatgccggaatatacttccctacgaacttccatacagtattccaatatttattcgaatctactttctccgcttccccatgtccagcacctggaacaattaatttctctttttctacttttgcagcattatatacttcatctaacatttcaaaaggaacgaatgtatcagcatccccatgaatgaacagcataggtgttttacttttcgctacttgttttacagctgaggcctcttctaaatcatacccagctcttaatttagtaaccgtatttgccgcattcataacaggaaactttggtaagtggaataaatcttttagttgataagtaaattcatcaataacagttgaatatccacaatcttcaataataactttaacattagaaggtaaatcttctcctgaagtcatcattacagttgccccgcccattgaaacaccaaatagagctatttcagcattagggtctttctttaagatttgttgaatccaaattaaaacatctttacgatcatgccaacccataccaacataatccccttcactatttccgtgtccacgaaggtctggtgctatgacattatagccttgttcataaaagttacgaatatatttcgtcatttccgatgctctaccactatatccatgaactacaattgcccatttatgactagatggttcattcatatattcataaccttttaaatttaatttatcgaaagaacgtatagttaatgtgttaggtttatacttcgatacgaagttcgcattcttttcttcatttgcagccaatacatctcccgacgcatttaccgtttctactaaatgaggattatcttgcaaaaattccttttcttgtttcgcattcaacgcgtagttataaaaataattcccaactaacatatacacgattactagcaggactaagactactatagtaattatacttatctttttcatattatctccttttctaacttaaatcttcttatattaaagtacatcaaaaacaactgtactattttaacacactgatgaatcctatctttaagaaataaaatagaaaatcttaaattagatataaaaaatcacgaaagaaattgaataaaacttatatagctacgtacccaaaggccttttaaaaaatgagcagcacttcaaaatatttagctttgaaaagaagttataaaacacaaaaaagacgagtcattctgactcgtcttaaagttgcttggcgacgtcctactctcacagggacaaggtcccaactaccatcggcgctagagagcttaacttccgtgttcggtatgggaacgggtgtgacctctctgccatcatctggatagctgcaacgatttgatctgttttaaaatccacaacatgcaaaatgccgcttggtgttctcatctatatctctccctataactaacggtcgctttaagatctggtggcattatttcgattaaattttcgccacgtattacagttggaaaattactaaaaatgtcttttaaattaattgcattcttaccgttaattgttacaagacttttttctgtatcaataataattttgtctcttgcatcaaaaatgtaaggcggatcgtttttggtatttaaatttactttccaaaactttaaatcactaactgacatcgcttctacgggcggaacatcttgccattgcataatactaatctgaatttgtgcagctttttccatatggtagttattttcatctgtccaccgcgcaaaacgttctgaatcatctttctctgtccctggtaagaattttgaaatataagcttcccatacatttcctgttctagctatccacaatcgaccaaaatactgattccatgtattcggataatcaccactctcataaatcagtcctgtttttcccggcttgttatcatatccaataaccatcgttccgaaattttgttcagcttgccaaaagaggtcgttcatagcaatttttgaaagaaccttgctattttcatcaagtatcgctatctccactcggcccatttcattaatctttttactcttacatgtaacataagcttgcataatgaaatcttgtactggaccgccaggtatattttttttaacagctgcaccatgccatcctttgcttgtactggtaccaaaatcagaacaatagaattggtatttatcggacttcatttcaccaaccggatcaccatcttccattgaactgactttactccaacctacagtggtagccatttcatcccatataagcctttgatttctttcgacaggtagttgctctgtttttaagggataaccgattctgaagtaatcacgattataaggggactcaccaaaccacacatctaaaaatgtacttggtttctgtgcttcgatttcaataattggaggtgcttctatattcccttgattaataaaagaagttgtaacttcagtatcacctttttgagagaacgtgtgaatattttgttttcctaatttatatggcattggacaaacaaaagtaataacgcctttacctctattaattatttcatccaagtcagcagaaccatcgattaatgctagataagtcctatctaattcatcatcaaaaacaagttcagcaggttgctctgtataaagccaatccgctaaatcttcttttaccttttgtaaatcagccatatcttttttcgctttaattacaagaggaacatcaatacgacgttcctccgtttctgtatgaagaaaaagagcccctgcgcgatgagggactcttactaattttcttttaactggagcccaggaagggcgttttcttccaactagcatttgaatataatcttttctgatcttattaaaagtaaaactgagtttccccaccatgctcaccacccttaaaattccgctcttcttttttggtcacgatcttgaagctttgtcgtatatgcgtaacttccgtttgctagttcttttccatctaaaacgtttgtcatattcaccgttacattcagttcttgctctctacctaatctatccgagaacatagtttttgctgtaggtgcgttgttataaggtgattgtagttgcgtataaccattgaaatcagcaagtgtattatgcgggatactataatgcgaagtttggaatccaaaatcaaaaacagatggcatattccccatctgcttcttaacggttccgactacattttttgctgcatcgacaacaaatcgtttccctttatccataccaactccaacaccctctggaactgcgctaccgactggaatcatcactttagatggactgttaatttctaacgctccagaaatagtctttttaatctctccagcaatgcttttcgccttactatataacccacctgtcgcatcatccaaacctttttcaagaccttctatgatggatttaccaatggaacgtagatttatagtgctaaagaatttttcaactgtattccacttatcttcaatatcgctctttatctcccgcattttgtcattaacagcttttttctgctcttcaaattttcttgaaactgtattttttatttcttccaccttgttgtcggctgaagttttggtttcttcccaccatttcgttatacctgaccaagtttctttcatcttttgaacgacatcatctttcattacttggtatttggattttatctgaccagtttcccaatcaacttgatttgctcagatggttacggtatttactttccagaccttcctggttgcgtttctcatgcagatacacaagaagatgctttaaaggaaggtagagaagcattaggacttcatttatatggtatggaaaaggataatgaatcaattcccgagccgacaccaattgataaattagaattagataaagacgaaaattcttttttaattgatgtttggatgccaccacttagaaataaagacaaaacaacttataaaagaaaaaatgtaactcttccttcttggttagaagaatacgcaactcataaaggcgttaatttttccgagatccttgtagaaggtttggaaatgcatttgggcattaaagataaaaagaatacaccataaaggacgccatgagcgtcctcttttttatataagatatttgtttactcatattcatatttttattcttctttgaaccgacactatagataggcacgtatcagctcaaagaagagcaaaagctctccttatgaaccgtttagttattttgtattcctgcataatcacaattagatttgaaagttctctttgtaattacgtactcgccctataaacgccagttcattcaaacagacatccataaagctttattcggtaaccaacccattaaaattttacagttactattaaaaatagaaaagagcaaccatgcaccagtcgctcttacgtaaaattctatgctattactataattcattttttcaatagataccatatgtaaaacttactgtaagaaaagtgtaagttcctcagcaagctttatccttctagaaatttcagcatgcttctgatatacataactactactatagcctaattccctagctatagattctaatgtttttcgctgcacatacttaccaaatagaattttattttctagtccttcaaacttactaattaatattttgaggtcgtactgatcgttcatcttattcgctagttcatattctatagccgctatgtgttcctctattttcgcaccatctgaatcagcagttaacttatactttgataaatcaccaacactccaacgcattaattctcttttacttctatgcaatttattttctaaataaataatttcatcttccaactttttataatctttaaaccattcaaacaagggttggctcacctgcttcctctttcaccatgtaaactcatttcttcatgttacgtttatttaactgttttcttaaatgcccgtaactcacattaaactttttagcaatttcaatatatttcattccatgttctttaagtttcatggtatcttcacaaattttattccattcgtcttctgttctttgtatggatgttttaacaaaaactttaccacccaaaacaacccctatttcattcaatctcttccctacttcacactttgtccaacaatacacaaaatcacgagaacatttattgtcacactgacggcaatgattatctgttaatcctagtatttccaccctcgcttcttttggactcatatagtaaccattcctaacttatctacatgatataaataatcaacaggtgctctattagtttgtggtactatatacgctcttttctcaaattcctctcttggaatagactttcttcctccatcataaagcatagcttcatagtattctgctactaccgaaacaggaacaaaataaataacctgatccgttctgaactctattaaaaagaaacaaattgctccctgttcttgtgtatcctttaaatagtcaatttgatgtctacttatattatctaacgggaagcttgtggttttttcagtagatttcgcttcaaaataaacagctcttcctttgtacacaccgtcataatctactgtagatttactttcccatgcacttttagttatattgcctttcttatctgtctttatcacttttattggtgtagggcgcttattaaatactcctacattcgccgctttatacatacggcatgtattgtttaataaaagctcaaatgccattcctctatttgcgtaacccataatacaccgtctctttccactaaaataattattttttacaaattataatcttgtactacctggcttaagaactctcttaccgcgttcttctttcttgcttcgggtttaattacaagctcagttaccttaaatcccagcaattcagcaccttctatatttcccctaagcaagttatgtaaattatgactataatactcatccgttacctcaatcaccaattcaagcttatgaccagcaggaaatgtaagcatttttgttgcttctctatataattcatcttcttccattcttttccgatgaaaagttaatagctgcgatgatattcccttttttaacttctgcaaggattccttcatcaagaaccttcagtttagaacctgtttcttttacataagcggcgtaagtctcattaataaatttttcttgtttcttcgatgttatttcgacgccttcttcagtagcactaatacttctttctaattcggttacttttttatcgtaatctttagttgctactctattagcaatatcatctatcattttatcaatatccgtttgatctttcggatgtaaccaaaattctgtagctatagtgccacgttgtaacataggtgcagcacaccataaacgcccatttcttgtcacataataacgccatctcacaaacgctgcatttgctggtgctttgtctgaacacacagctcgaacccatgtatgatttacaacctggatattcgttctagctgttttaatgcgagtttttttgtcagcagtccaccattcaatttcaataaatgcaccaccgctatcaataggtgtttttccatcagtattgaaataacctgatgcaacaaattcttcgttaacctgacactcaataaattgacttgtaagtccccaccaacgatcttgagtctggccagtaacggtaattgcaaaggtattcatgcctttgtattttagattcgtatcaacagaaccagtagccccattaccactattccaaaaccaatatttctgtcctaacttaaaatcagcatcacgcaactcgttgacagtacctaaaccgcctacataatcctcaacatctttctttttcatagttaatttcaatgcttcagaatgttgacctattgttgtagtagcctcactgagcgttttcccttgctgagtttgtatttcttgcactttaccgacgctttgtgaaatactatccgcggttttctctactgctgttacacgtttatcaaatccactctgattattttctacatttgttatggtttctttaattcccttcacattttgctcaatctcagttgtttttttcgtgaacgtttctttagaagtaacttcatcattagcaggttgccatgtagttcttatgttcccctcttccaatttcgcatgatgtgagtttaaattaccatcaatattgcgtccagaataataaaacctaatttgagttacatctttatcttttgttttgaacgtaacagttagaggtgcgtccttataatctacattaatctttaattgtgagtctgcacgtacagatttccattcttgctctccgtctgtataagttattgccgtttccacaccaaaccaaggatttgcattgagtttcgtcattttcccagtaaataagaaggaaatagtaaacgttttgtttctgtaattaatcttattggaaagagtcatttgcttactgtctgaccatgttccggtcatattctgtttgtttaaccctgtttctgaatcgcttgctagattaattgaacctacagaaatgttactcatgtcggtttgtaattgttcaatggtctgcttatttgaagtcgccgtattctttatttcatttgttgtttttgttaaaacgtttgttgtttgcttcacatcggcaatagtttgttttgtaccttcaactgtatcttccactgtatttaatttttcagtaatttcatcgtctttttttgttaataactcaatagatctagtaaaactctcgttagtctgtttcatttcagaaacagttttattaatttcaccttgagagttttgtacatttttaatagtttgcgaaacttcttggagaccatttttaacttccttgaattgtccattggtttcactttgcgcttcttccactttcttatttaattcttcttttgtgagtttaatatccttattaacctgctccagtgtatcttttttaattgattccacatcaggaataagaagctcccaatctttcccgttccacacttttaaaatacctggtttaccgttgctaatatctctccataacgtcttacctactataagattatcaattggtggatttttagcttcaataatatttaccgtattattttttaggttttcttgaactttttctgccaactctttagctacttgagattcttttcgtatggtttcaattgttttttcattctctttcaccagtttgtttagctgatccagcatctcttgtttattacctaacgaactaagaatttgattataaatctttcggaattcttcgttaggatctacaatttctcgataatctccaaatacatatttatcttgtgtaggatcagtaaaagattccacatcactatcaagctaagattatacaatatcaagtatagtagagattatttcttttttctaaaagccaggcttagaaaatttaaaggtttgcatgcgaaataaaccctatcgggtttcattttttgaattaggccgcttgatcttcagaaatggtagaattgtaaacgacacctaatatatcaaagactgttttcttctcatatctgtgagattttcgcccattttgctgtaggaggttgaacaggcgaatgagaatctttgataattcttgggtgtctttctgtatggcttgataaataagaaaaaaataatctctaatcatatatatggccttatattcactcagctctcgtttctttttcataagaagtagttgacgcatttgaaacatagtagaagaacagaggagaatggcgatcagttgcccatacaaatggcattctaatctttctcgttttatttttttacaatggtgaatatgaaagaatgatttccatgttttaaataaaatctcgatttgccaacgtaaagagtaccaatcatgtacttgtcccatcgggacagtatctgtagaggtgtttgtcatatatacattgataccactgagacgtttactacgaggggaatactttattcctttctttttctctcttacagcttgatcttgcaatcgtttttgttgttgttcatctgtaagtcgatgaacaatcacacgagttggtactttatcagtcattcctacataagcatcggatatttcataggtttgtcctggttggagagagttcattaatacctccatatctatctgtatatactctgtacctttcttgattcttccatcttgaaaataatcaggtgtgagatttttttgataaatacgtgtattggatttaatacgagagatatagtaagcctttttatcttgtatatgttgaagatctttcaaatgaaaataccctaaatcacggatacataaatcatttggtgttacagttggaacacacagagaaccataggttcgatcatgttgtttccctggacctgtatggatatgtaggaattgtccgcttaataggtcatattcaagttgaattttcatcccagcagtatggctacatcctccagccccaggataaatggttgaaaatatatctggaagctgaaatgcagtggaatctaaaatgcgaatacgcttgaaaacagaggtgtatggagaagaaagtggcatagatgaagttaattttttatttagaaggttagtcaatatatgttgtaaaaactgaactgctgatgtattaaaccgttgattcagtccttctggactgatgagtacttctgtggatgattctaaacagctagataactgagctaaagaggttgtagcgatattttgactcatccatatacataaagcgactaaatcttttgcttggtatttactagttcgttgtacaaaaccaacatctctagcaagatcccgtaaggtatttggagataaaaaactttgaatctcttgagcaaatagttgtaattcatcagacacagaaacagacataaaaaacgccatcctttcctataattctacagaaaggataacgccttttttactttatggatagtccaaaaccttaattttatagcgatgtagcggtaccaaatatccgtttaataattatttatgctaactttatatatctgtataatcaaacgttattattcatttttaattgctctaaaagataatcacagacattcacaaaaatacattgtttttttaaacttaataataagtatttcaattcaaattcttgataaaaaatcttagtgatatatagtttaaactcatctaaattaggcttttctgggctatatagcatatctaaaggaagtttaaatttagaaaacaaatgatcgttttgtgcaaaaatcgaaacttcttctctagttaatcgatcatgaaatgcaattgaaatgtttcttaaggcatttacttgttcttcttcaaattcatgatctataacaaatctataaaatgggaattcatctgactgaatcatactttgcataagtctaaattgatatcttaataaagtcacttctttgattaaatccatatttcccctcctttatttccctaaattaaccagtttatcataacaatttataacttgaaatacaaatacttatgatatatcacccatacaatttttattaacataacctatcattatcaatagttaacgatgctaaaaatttcgttatggggtaattaaaactattagcttgatagggatggggtacttagtttgtctaagcatctgatacaagaccatttggttgatttggtcgttcgaataaatggttggtctcattttcttatcgaccttaccatgtcttctcgaataaattgtccttcctatctgtgtatagggggtcgtatcataattgtataggagtgctttagtactaggtgtaaaactcattttggttaatcctatcttaactccatcaacttcaacgaagggtactttggttttatgccctttatgcctatctttacgattatcaagattttcagctggagtaagcattttttcgaatactcctccaccatgtttgttcttaatagacttgtagaatgtatagcgtattttgtcatcgcatctaacgaaaattctagcagaatttcctatacggaaataattactaataccaataattttggtgttaataagttctatttgggcggcaacatcgtgagagctggttgttttccgaacattgtaggtatctcgaaggatttctctcattttagagtttaatttctttttgttcggtatagcttttcctgcaatacggtttttcagtctcatcttttcagctctgatgtcgaatcctaggaattgggctggcttctctctcatatcggtaataaatgttttctcctttgataattctaatttgagtatatgtttgtaatacttattgattttagtcaagagtgttcttgcctgtactttatcctcgcatagaattatccagtcgtcagcgtatctaacaagaaaacatttcttatgttttctaactacttttctaagtcctgtactgaaagcgtgtttaacagtataacgcgcgtagtgttcttcgaactctttagctatcatccagtcaaagttatttaagtatatgttagctagcaggggagatataattccaccttgtggagttcccaactccgtagggaaaagttgattatcttctagtacacctgcttttaacattttcttaataatggttaggaatctcttatcctttatgcccatattccacattatttcaacaagtttattatggttaatatggtcaaagaaacttttgatgtcaccttcgatggctacgtatgtttttgacctagaaatggtattcaagattctgcctattgcatagtgacatgaacgatagggacgaaaaccgtaactatggttgaaaaacttcgcctccgctatgggttctaacaccattcttgctgtttcttggattatcctatctatcatggctgggatccctaaaggacgctttttaccattgcccttgtcaatataataccttcgaacgggtttaggtttgtagttgtctatgtgttcccaaatgagtttgataagctgttccgtttccatttgcaggtagtagttcacgtctttcttgtcaattccgaccgttttactcccacgattgcttttaatgttgtgaattgccgttttaatagtctgcttgtttttcattagttctatcatgccatgaaaagaagagttatcttctttggcctttttgtatattaggtctaacttatcttggagctgtgcttcattatctatcaaatgtcctttaatcctcattacgtctccccattattcaagcgattgtaacgatgtgctgtttaattcccactctagaagaggttcatatagacatttgaaatatccattgttattctgaatcgactggtccccttcgctccacggacattactccgcttcctcactactacgagaccgctgccacttgcattgtttcaagcaggatcacactccctatggcaatgcaagcttcccaagttccatttgttctatcccttatttttacattcctttaggtgcccactttacgccgacggtactcaccagtcttgagtagctctaacatactggttcagcataatcggtaattacgaaaccgattatgtgcaaggattagaacttcgagcctctccttgttcccgttattccttccgattgctcacgttaagaagggattccctcacgacgcttcaaaacatggattcctttcgtcaccattggaatgtttttaaagaccaccgcaccatataggcattagtgagttgtgccatcaggttacgaccttacctaacttcagaccctaactcgtgtgtaagttagcgcatgtaggggtatcatggctaggattaatgagctattatcctagaatgggagtttcacccataaaattcgaacaaatagttaggctgtgtaagagtcagcctttctagctagctttttagaaagaataacgttttttgacacttgggggtagtgcaaattcttaagttgatgggcatgtgtctgtacccccctatgaattttctatacttgtactagaagttttatacatataggtgaagggaggaaattaattgggacaagtacgtgttgacccagataaattagaatcagctgcaaattccatgtcacgaaatagagagtctatggaaagtataattcgagagcttttacaagtcacgttcgaattacagatgtcttgggaagggatggcatatcaacggtttttcgatgaatttttctcaaaaaagaggagtatggatgatttagttaagcatttacatcatactgaactcgaactaaagaaagctgcgaaaacattccgtgaagcggatgagaaagcgtttggggattttaatcagatgggcaagctatgggacgcctttcagcgaggaagcgggaaggctgcaggggacactatttttgatccattaaaaaaagggtggaaccaaacatccgactttttcggaaacttggtggataatccaatggacgcattggaagatgcaaaatatggacttacggactttgtggagagttctattgatgatacgaaagaggaatttagagataaatacgaatttatgaaagatatgtggaataatcctattggaacattaaaacatgagttggacgaggaagtccaagagatgtatgctatacgaaatgttttatcagattggtatgtggagaacataaaatatggagatgcagaaagtatcacggaatcagtagcatacggagcgactaatttagctttctttggacttgtcacaagaggtgccagtgccgtaggtaatggtgcaagatggggaaaaaatttatcatctatatccaagcttcagttagaaaatcgtttagaaccagctttcgcttatggtaagatagattataaagttgatactattaaaccatcagatacatatatgtttgcaaaaacttcaagtgcggtaaaaagaaagaccccaggtacagtgacctcaagttttaacctcgaacgaagtttaggtacccaaaagaagttaatgtataatgatggtgctattggtattattccgcaagaagttcgagaaaaattagtaggaagagaattcaaatcttttgacgattttagagaagaattttggaaaacactttctgattcgagctatgctaaagaatttagtcctatgaatataaaacttatgaagcagggtaaggcaccttactcaccacgagcagaacattatgggaaccataataaatatatactacatcataaacagcctattgataaaggtggagatgtctataatcttgataatctaataattgtatctcctaaaatgcatcaaaacgttttagatcccgcataccatttcgggaccaaagggctataaattaaacggaaggatgaaaaatatgacatgtaaaatgacgaaaacagaactgcttgagcttgtaaaaaaaatttatgatcttgatttacctgaagatgaacacagtaactatgttcatcaatttaataactctgctgtacctcaccctgctccaagtgatttaattttttggaatgatgaagaattgactcctgaagaagtagtagaaatagcatggaattacaaagaagaaaaaaaataggataagatgtaaaataactatgagttaaaatgttcaaaaataaaaaacggcctagaattctagaccgttttttttatgatttactaattttccaaccttcttcagttttctctaattcaattacgattacttttttataatcgtttttagaatcttttttatacacagcatcaacagttactgtagcgatttcgtttttctcttcaacttttctaatcttatagcttttaagatcttcattaattgatttcattaattctgcatttccgccaataaaaccaactattttttttgcttctggtgtaaataactttccaaaatcttttgcatttccgtctttagcatcttcaaaatatgctgtagcaacttcttcaggatcacgattatctccacatgctgcaagtgctgtaactgataaagccattaccaccattaacatgatcatacgcgtaaacttgttcttcattcaaaccgctcctcgtatagtatgtttaaacttaatttttttactttcatgagagacctgtaaaataactcttggacgtctcaagatttcatcaatactaaacggaggactcttccttatttcgtctaccactacaccgtcagagtctctccaactatactcaatacgagtcaaattctcttcttctatcattcttttaaaatgattatataactcctttttcttatcatatatcttcaaatatccatctttatttctatttccataataaacagttcctttatgtctatcctgttgctttcctgttttactataagacacaatatcactcatatgacgctctatatcaaaagcaatatccataccataaaccactcgcttattagacttcaaaactgcatttaacgtatgaaaaacggtttcaaacactttttcataactatctttttgcaactcgttattttcaaatttagaagggttaaaatcaactttcatatcatagctatctttttccttttccgaattatgtttccaccctatataaactgcaccttcaccatatccaatatgtataactctatgataatctctaacagacgtcccatgttctgacctaataggtgtattcggtaaaaaaatctgctttgacgatattttagttaaaacatcactaaattgtttctctgttacatctttatacttaatcattagcctatccaaataaacttgcataaaatctatcccgctccttattttttattaaacatgtcattttgtacacgattttcggctattagaatgtccgaaaatgtcttcgccacatttctacaatttacccacacattgaattatactgttcaatctctatcgtgacttcaaaaatttctaattgccctaaataagaactaatagcattatccaataaaaactcaacattctctggatcaactacactttcaccaggaactccaaacaactttacacgtaattcgctaattcttttcaaatcattcaattgtctttctgtcagtttcaaattgttaccctcactttctatcaatctgctcctacacctccgttacctcgccgaccgtacgctcttctcactcattccatttcgtttgccatcagttcacgcgccgtcgtgtcctttgagagtccactccgtcaccttaccttctgtctgcacttcacttcattcatgtcgctcccttaagtcgtctacttccggctccgtcgaatacacttaataaataagtgcccatttacacagttaactgccatgggtttcctttcagtcatacaacgttcacccaagtgaataataattacaactcatacgattacaaaagccgtttcctaattgttcagggacccatgcacggatattctaaatgagtaggtggcgggcaaacttcagccacaccaactacgcatttagtttatcgatgtgcatctcctaatcaataagactacattttcgaaacataaccgttacttcaactcaaacatattccctttttgattcaattgttgctgcgttacattttcaaacatcatactcaacatttgttgcatctttggcatttgttccaacataaccttttgattcacataattctctaaagctaaatgaactaaagtgcttttcggtacaccactttctttgctatactcgtccaaccaatcatttaactttttactgatacgtgtattaacacgaaccatttcactcatctaatcacctcttgtatatcgtactacataaatataacatcagtttaaacacaatatcaacactaagatacaccagaacaatgtaaaagtgggactctatccgctattaatataaacaagttaagaaaaacaaaaagagagcatcatattgacaccctcttgacacacagagaagcacacgctaatatcataaacgagtatagttcttaatattttctaatatagataaccaacagtcctgtagaatggggtccaccgccaagtgatccatttcttcaagggctttttttatactctctttagttctacgagggaactctttcatatccatagttccattagaataacaaatcaaacaagcttttaatgcccctttaacattattcaaattaaaaatcgagaatgtataagattcatcaatactaaacggaggactcttccttatttcgtctaccactacaccgtcagagtctctccaactatactcaatttctagctagctttttagaaagaataacgttttttgacacttgggggtagtgcaaattcttaagttgatgggcatgtgaattaacccccagaatttaattttttcttctcctcccaaaactataaacttactatttgaagttccgattttcacttaaagcatttacatgtatcaccctctatttccaatatttataataatagtaatataaccgactataattgtatatattttacaatcaattcacctattacgatcatttgaatttcgatatataactataaaaaaagttattatgtctacataataactttttttcaccaatctactagcatagttctaaatatagaaaaatatcctaataatatttgaggaaaacatattcatataattttatttttgtatattaaaattatatataaatgctatactaagatgaatcaagaagcatccaagattctttgattaatcactacattttccttaaagcaaactcaacaagaaaagacactgtatagtgtcttttcttgttgagtttgctcctttaatcaatagtaagagaatatatatctataccttcttattgccgattggtattagaattgctgctcccacaagcagaatatctgaaagacactcatataagagtgtcttttctttatgtaaaaaattatttttaaacaaaaactctttataaaagaacacaggttcgtatataataagaacaaacgttcttttgatttaaggaggaatcacagtgtatgactattcaatcctaccgaatagaatcatcttatgtgttgatttacgtagcttttacgcttcagttagttgcattaaaatggggttagaccctatgcatacaaagttggctgtagtaggtgatgtgaacaggagcggatcaattttattagctgcaactccaccactgaaagcactgggcgtaaaaaagatggcaaggctttacgagattcctcgaagaaaagatattcttgttgtgaatccgattatgagtacttacataaaatgctctaattacataacggagttagctttacaatacgttccttatgaggatttccaccagtattccatagatgaatttctgttggacgttactgatagcattcatttatttgctaacgatccctatgaatttgctttgaaattcaaacgtgaaatatatgagcatacacgcattgaatgtaccatcggaattgctccgaaccctttaatgagtaaggttgctttagatattgaagcaaagaagaacaaagaaggtatcgcatattggaagtatgaagatgtcccaacaaaattatggagtatacgaccactcaataaattttggggcatttcgtacaaaacagaagaaaaattgaatcgaaaagggatacattctattggggatttagccaattaccctcttaaatacttaaaacaaagcttcggcaagattggggaggaattgcacttacatagcaacggcatcgacttcagccgtatttcggaaaaatacgtccctgctacaacttcaatcggaaaaagccaaattctaatgcgcgactatacaatagaagaattcccaattgttctattggaacatattgaagaagtctgttatcgccttagaagacaaaacaaacttgctcaaaccgttcaattctctgttggttatagcaagagttatacaggtggaattaggaaaacacatactttaaaccgtccaacaaatttaacaatggatatttatcatatctgtacatactttttgcatcaacaatatactggcgaacccattcgcagcataaacatatccttaacaaacttaattcaagaaggagaagaacaaatttctctttttgataatgtcacgaaacgagaacaagaagtgaagctaacaaaagtaatggatgaaatacgcacaaagtttgggaaaaacagtattttacgagggatttcctacacgcatagcgctacagctagacacagaaatacactaatagggggccacaaatcatgaataacgctaatatgccaaaaggaagaggaatggtgttaacaatagtataatatatgagtagagataacgtatacaacgataggtagttctctttttttgtctctttgtagaaattttggtttacgttttggtttcggcttttcttcttcctcttcttcctcttcctcaacctcttcgatctcttcctctccttcctcttcaactttctttttagcgaagaattgtccgtctccaaatcgtaatagaaagggattttcttcaattgcttttaacatgtctgtcatttcgttttacctccttatcccattttggtttgtggaatgtttctatattttgttttaaccattcctttgtagtactagaaaaacgctctcctctttcaaccacttttaatattttagaaacttcttccttactacaattacttaaagctaaagtgattattgtttgatattcagctaattcccaacagattgcatcagacaattcttgacttgttttgaattctttatcatgaactttcacttcttacaccccttttgtttttctaaatacagtgtataacactatcgcaaaacacaatatatagtatgacgtgacacattgtgacaataaaacacaaataaaaaaagaccaacctaaaaggtcagtccgaaaattaaatgatgtttttctttctattactatttgatatttcattatgtaaaatagttaaaatgtccatgattgcatcttcgcttatcgtccgtttattatcataaatattttctctaacatctcttatcaattcaggcatattacgcaaatgaatgtttcttctcacttgtctatctaattccaaataccccttttcttccaaactccttatacaatacctcacagtactacgagaataaaatgtttcttcttctaattctgttaaagaaggactatacccatgtttgatttgaaaattttcaatagcattaaaaatagttttttctgtatcgttcatcatactttattcccctctactatgatttttttaattaactataaaaaacggtatctttatcaactggactttgcctctctcttataagttcaatagcttctgattctgtcaacccattgatgtacatttcccttacaacaaaaaaaccaggttttccgcttgggcttgcacccatgattttattaatgcgtttaatatcattaatcatatactttggtggcactttgcctttcccaatgatctgtttaaattcttctgacctacttatgatatctattgtgtcgttttttaataaacgctttgccccacttaaaccgtctgtttttaagacatcagccaaaatccccctttctctttttgaaagttcgcctgcatatctacctttaaaagcttttctctctcttctttctgcgttaataaatttattgatttctttttttgtcaaacttttattaccatcaaaaactttttcgactaaagaggcgtcgcctttgtatttaaataacatttcttctaatcgtactttatcgaattccccgtttttacgttttgaaatctttttggaaaatttaatatcaaaacctaactctcttatcgtcttataaagtgtctttttcttcttcttcatacaatcacctcattaatgtttctctctttctctctttgaataagaaacaatagtgtctgaaccttcacactccggacaacacaaaaaataattatgttttctaggattataattaattattttttcgttgatacacccacaatctttacaaataattttttgtttgtattgtatgtatggatatattttagccatgtctaactatcctcatatttctgttgcattgttttataaaagaaatcatgcaactcaataaatagcttgtcatcagctttctcaaagtaatcaatcaattttataagtgtttcagaagcgttttttgattccaatctttgtgacactttatcaaatcttttttttgctctagcgtccactgatatagttgttagctttttcaatttcaaaactcccttccataatgtactaaattacatatattaattttaattcatttttaattaaaagacaacacaatatgtcacaaaaatgagaataataggatgtgaccactcgcatggtagttatactataaaaatatttcccggattacattttagcaaagaaaatgattgattttgtacatgcttaaacaagcgaaaatgtacatgtttatcttgacatttacaatttatcatttttatttaataatcccacacaataaaactttatcaaccttaaaatgtttcataataaaaaatgaatacagataaaattaacaatatactcacttgatgcacacggaaaacgctcaaaagatataaagttcttcagctaattcccattctttcaaatacgtacaagctaacgccataaggttattacaataaccgattttcacttcctacccattgtgttcagtaaatatttcttttgcttttgttgcttgttggaaagccacaaaagcctgatagtaatgatattggaacacagcttggttataataaaactctgccttttcaatttcatccggaatatttttaagtgaattttctgctatttcataatgctctttggctgcattgtagtcaccaactgcattagagtagattgctttataaaaatgataataatacgataagaaatcgtcagttggtttattaaaagattcaatttgatcaaaactatttttagctacactcaaattatctattaaatatttataaccaaaatcaagtaatgaataatacagtaatagattttggtcttcttcaatattttctatagaactctcaatttctttttttatttatatgcattcgcaacatttctatttcgaatttcaatataccaggcatttaacagttcagtaactttattatttatagtagtttgaacatccaatttgcatcctccttttccaaatttatctatattttttcccttctatactatcacacaacattaaatcttgatatcttcataaacttgagattaatttaatagaaaattcagatgaacaaccatctaactaaccgtgtgttttggttacagcctcatgcccataaagctaacattttgaagtgcccccaaaacaacaaaaatggacctgatactataaaaaacacaaaatttccgtttatcttagcttgatcgatatagggtagcgtatcgttaaagtatgtatcatttttcttagcagcacgcttacgcccaatgaagatacactgtttaaatgcatcgagctcctcattatcatcaccaaaacgcattaaccaatttcctcgtaatgctttgctaagaaataactaatatcatccctagcgaatctgtcgtatggaatgacatacaccataatctcaccttcttgtaaataaatgaacaaaaagttttagctcattagaagcatatcatcaaaaaaggtagagtccttaatacaactccaccttttctatatataacgaatcatttaattatttaacagtatgtttttaaaatctctatattttagaaaacttaacaataaaaccatactttcctatttctttgaagaaacaggatccatttttaatgtttttattccttcttttaatgtaaacgcatctgctcttaatgttttccagctgtctttggctgcattcagattaggttttaagaatttaaatttattttgatctgctttttgggatgctttatcaatatgattaagtactcctgaatattgagaatctaaatcatgccattgtgctgacatataggtgagagcattaatagctgatccaattgcattttgcatttcagcaatattattatacgcaactccaactacacgattcaatgtaattttatagtctaccgtttggcgcaattgcgctaatagcggttccagcgtacttaaattatttcttgctacccctatcattacacctccagcaatccatgtagggattgagggaactgatacagttattattccatccgattctacttgtttaaaatgtcttacttgctctaaaacatcatttagacgtttttcatcttcatctattccagatgcttgattttttaaaatcgattgcaagatatctttatgacctccaaatgcatttgtcgggtaaaagactggcgcggtatcagttgtgatccgtttccagcctctccccataagaactgctcgtgaggttttccctcaagcagctcaccccataaacttcatcaaaagggttatgagacctatcaaatggcagacactttcatcggaaactctctgcacttttcaggggaaggactttccagtcccagtaaagccccagtacaccatagagatattcgttactccatctctgccatccgatgctacgctttcgtcgtcgtttccttctcgttaacagtgtgcgaattttcatctccgtataatcacgtacttcactgaaagcttgactagagttcccaacccggaagtagttcacccatccagtcagtacggcattgatttgttttattaagtcttgtgctggcttcgctcctgcgttttgaatgagttcgcgaatttttgctttcactgtcgtgcgagctttcttcttcgggatcatgaaaacgaagaatccattcttatttcggttcggtattcgtctcaggtcaaatcctaaaaatccgaaggattctccttttaggacattgaccatctgagtcttctccagattcagttcaactcccaaaggctttaactgttcccacagtcgtcgtaatgccagttcagcccatccacttttactggagtgtccgcttacagcgataactatatcgtcggcaaaacggtgatagtttacagcttcgtaattgccatcagctgttttacgtcgaatggtatcaaatgtccaatccacttcattgaggtaaatgttcgcggctagtggagaaaatggtcccccttgcgggacaccgatctttcctgttgccttaattacctgttttacaagatgcataacctgtgggtcttggacacgtttcgcgattttctccaataatatgttgtgtcggattgtatcaaagtagcgtgacaaatcaacatcaattattatggtcatacggcgcaatatactgcgtcgtacttctgccaatgcctgatgtggagagcgtttcggccgaaacccatacgagtttggacagaaatcagcttcaaaaattgcttctaatatgagttttagcgctccttgtactacacgatctcgtatacacggaatttgcagagttcgcattttgccgtttgtctttgggatttctacttttcgattggcttgtggttggtatattccagcttgtaattcttcttgaatacccgttaagaatgggataactccttctagttctatatcagcaaaactttttccatcaatgcctggggcaccattgtttttcctcgcctgttgatatgcttcgtgaagggttgtaattttggtaatgtgggtaaatatcccccaaaaccggtgcgtaggttcagacttcgcctttcgatagattcgttgccttagttcctgcaaagtgatgggtgtttttgtcatagcacccttgcctcctttagtcatacgaaatgtttacaggttcggatcctttcctccccgcgtgttttgctgcacgcagatctctggtactacgatccgttccgccaccctgacacctaccgttctcacttcccgatcgcggttatagagacggtctcctcgatgagatttcttcatcgggtgtcgagggcttctccagtttccacattatctttctctccatgtcgccgctgataccccgccggtgagaactgccgttccagactcgtttcggtcagttcttgttgctttcgcacgttatcgaccgtctcagccaccggaattgcgtgtaacgaggctacatctacgttcactgtacgttacaacctggagatttgcccacatgccttttgcatgtgatgtcagagggcttcgccatgtcgctttcacttcatggcgcctctcaggctacgggagtggagtctattctcccgattggactttcaccaactagataatgtgtccttatctggacacgccggttttgatcgcctgatatctgaattagagcaaatgggtttacgtggagaaaagattgaagataaagcccttgcagcaggtggcgagcctattcgaaaagctatttctgaaatagccccaaggagtgatagccctaaaaaagcaacaaaaagcgagccgtggcgaacaggacaacatttggctgataatatacgggttacaaaagcaaaaatggagggcggcataaaaacaatcaaaattggtatagataaagcggatcgttccccctatttctatggaaagttcttagaatggggaacgtctaaaatgccagcagagccatttatagaacctggatttaattcttcaaaagaagcggcaattcgtgctatgacagacatcttgaagaatgaaatgaggttgaatatatgatgaatttacgccccgaaattgtgcaagctcttgaaaataatcaggagcttgtttctttattgggtggaaaacgtgtttattatcgtaaagctaaaaatgctgaagagtttccgcgtattacgtttttcgaactagacaatagaccagatcgttttgcagataacgaggaaagcgaaagcgaaattacatttcaaatcgatatttggtcaaaaggcagtacaacagcaatccataaaaaagtgaatgaaatcatgaaaagtattggtttttcacgctatgcggttgctgatttatatgaagatgatacacaaatttttcattacgcgatgcgattcgtgaaaggagtggagttatagatggctggagaagttattaaaattagttcgactgtcggtgtagatagtcttgtttatgcgaaatcggtgaaagacgatgcaactggagtggattatgcaaccgttaagaagttagaaggtgctgtaaaagttaaaacttctaaaaaggtgtcttctgaaattatgtggagtgataataaaaagtcagaaatcgctgagtctgatggtgaagttgaagttgaaattgaggttcgaggtcttccattatccacaaaagctgatattgaagggtatccagaagttacagacggtgtattagatgaaaaacgtgagggcgaaaaaccgtatgtagcaatcggatggcgctttttgaaggcaaatggtaaatatcgatacgtttggttgttaaaagggaagctttcacaagaagaggaagaagctgaaactaaaaaggataaaccgaacttccaaactacgaaacttaaaggttctttcattgaacgtgattttgataacagatcgaagtttacagcggatgaagatgaacctacatttacaaaatctgttggagataactggttcaaaaaggtatatgaaaaaccagtaacaccaccaacaggaaagtagggggagcaaaagctctctctcttttttattaacgaggaggaaaagccatgaaattaacactaataatcaaggaagaaaagaaaaattttcatttaccggagtttattccagcacgtttaattcgtcaagcacctgaacttgctgatattccaaataatccaggtcctgaggatatggataaaatggttcaatatgtagtaaaagtttacggggaacaatttacattagatcaatattgggacggtgtggatgctcgtaaatttttatccacaacttccgatgtaattaatgcgatcatcaatgaaactgtgggagcggctggtggcacaccaggaactggagaagaaacaaacccaaacgcgtagagggaggggggctaacgttcagtgagtttatggacgagctctacctctctttattacgtcaggggtataaacacatgcccatcaacttaagaatttgcactacccccaagtgtcaaaaaacgttattctttctaaaaagctagctagaaagtccaagatgtagcgattgcaatcataaacactatgcggtcagaaatgggtaataaaccattgacaccagaaggtattaaagtcatgacttcatttaccgatggttttaaacagatgaatatcggggaggtcgcatctaagttaaacttagatttaaagaagaatctcgatatagatttaggaccactcggaaaaatgaaaactacacaatttgtaaatggattacacgagggcacagtaggtattgacgctgtgtttattttttttcaacaacagttatctaaattaacagcagcagatttagcaaaagacggcactcgtataatggctacgttaaaaactggtatggaaacagggtttattaatgtacaagacgttctcaatactttgggagttaatattgaagataagactaagtacaacttagggccgaatggagaagtgacaattgcgtctcttgttcaaggcttacacaatgggaagtttaatatagatcaggcactcgaagttataagacaaatggttgtacaaaaaacaaacattgatacaactcagcaaggggcagctattccgcaaagtaccgcagatggaattcgtcaaaatgggggtcaacctgttcaagccgcagaggaagttaagcagggtgtagaacaaacactgggatcaaccacagacggaaatggtggagcagcttctactacattaatgaatcgaattatggctcaatataagccaaatattataggtgaagcttttaatattaaactaggcgttgaacagcaattaggaagtacaactgataataatggcggtaataacgcgacttctatgatgtttaataatattaataataataaagggaatgtcaatggagcggccgtaggtgttaaacaaagtgtagaaaatactttaggatcaaccacagatggaaatggcggcgcatcttctactcttcttatgcaacgactaattaacgggaataaagggaatgtagtcggagcagctagtaatgttaaattaggtgtagagggcatgttaggaagtgcaaccgatggtggcggtggtgataaggctggtaataaattcgcaagtgatatgggagcaaaacgtggagccgctgttgcaagcggaacaagtgttgctcaaggtggtaaagatggattagggagtgtcagctctcttagtcctggagaagcttttgctagtgggtttgctaaaggtatatctaatggtgaatggaatgtacaaaatgtagcagctagtttggcacgaggtgcatttgatgcattgaaagctacacttaatgtaaactctccatcaaaattaacacgtgatcaaggtggtaagccgtttagtgaaggatttgcgctaggtattcaaaaatcagctcacatggctgaaaaagaaagtagagaaatgggtaccaaggcaaacgcagctcttgtaaatgaactgaaattaaatagtgaatcaaataagttgagattttctggtgttcgtatggcacaaggaattgcgataggtattaaaagtcaatattctgttgtgcgagatgcattacaagatacagtaacaggagctatggatagtattcgttctataaaaccagaagaaatatttagtttccaaggtgatgacccactaacaaagtattttaatgcaatctttgtagatggagattggcaaaatgattggattacacatatccctgaaaatatgcgtgatatggtaagagaaattggacgtcaaatggaacgatttgagggactttctattcatgatgtaggcagcctttctagatggagagaagtattatctgataatcctaatgtcattcaatatagacctgacaatgataatcctgataagcaaccctatatttaacagtgagtctatcttatgattacatgaatgatgcagagaaacttcctaagatttataacaagttcaaaggacaagctccagatgtgattgagaacgggtggttgcagactcgacttaagaaagctacattgaacgttttctctaactattcagttcttgaggtattccaacatcaaggggagattaatggagcgatagaaaaggaatttagaaaaatggtagatactactgggttcttagtagattccgttacgttagaagcacctaaaccagacgcaaatacagcgaaagcgattcaaggagtagtagacgctcaacaaaaccttgaaaaagcagagattgagaaaaagcaagctacaattaatgcagagaaagccattgaggaagcaagaggaaaagctgaagcgaatgagattattaagaagtctttaacgccagaaattgtagaaattaaaaagatagaaaaatgggatggtaagttaccacaagtgagtggagaagctaatccattggttcaagttaaataattatatttccaggactttcttaaatgagggagtcctgggttgttatcaaatttgaattttattaaaaagggagagataggaaatgggaaaagtagaaatcacagtagaagaaagaattaaaaggaaaatattttatgattttatattgccagatcatgtatcggaaaatcaaatgaacatcataattgcccgtgtagaaagtcgttcggactgtgctgatgatgttgtacatttgttgcaaaaagaaatacctgggttaaaagtgagaaaagtagaagaaacagacttgaattttgatgatgctgaaatagttggttatgacataagagaaaactaaaccaaagcgttatttgaatagaaagggagaaaaaaatgaaaacatctaaatttcagtttaatagaaatccaattcgtgttcttgagtatagagagattgagcaaccaagtattgatgtattaaagaatacaccagcattatggaatgcttcattagatgatgcactgaaatatggaggagagcttacaaaggctgctattggagcgatgaatttacgacatgaccgcaagtatattgttgtagatacaaaagttcatatgttaatgcctggtatgtgtccggcgattcctaattggcatagtgacggtgttccaagaggttcggaattacgaccggaagcaaaagcaaatccacatatattcgcgcaagaaaaaatgagcactagccgttttcatctacttgttacaggtgaagggtgcttaactgaatttattggacaacctgtagagctagatgtacctgctgaaccaaacacaaggctatacggtatggtgaaccaacaagtaagagaaaaagtcgcatcgggcgaattagaggcatttacagtacctgcatgtacaccagttgagtttgattggtttgatattcatcgtggagtcgaagcaactaaacatgaatggagatatttaattcgggtgacagaaacggatcatatgccaccgcaaacagacttacgtcaaattattagaacacagcaacaagtgtatgtaccaactgattttggttggtaatgagatttatacaaaattcttattttagaaaaaggtgagacagaatgataaagataagtaaatctgaagattttgaagaaaaactacgtcggcacaataaacgaatggaagaagatgaattatatagagaagcaacaaaaatgcttacatttcctgctggtcataagcttgaattggtgtcttttgaagaaaatttagccataaaaaatgcacctccaattgttagttatgtgtctaacaattggggtgcacttcattattgatagtctttttaggtagatttacaacaattaattacaatgtttttatatgttgtttactatatacattcatattcgccttatgatctttagcataacctattacatggcataggttttttgtaccaagctttgttaatgcatttcgccttcgtaggtgttgaaggtttagaactatcctttagtatagtcatatcattagaacatcctgcgatatttagacagaatatagctaataaacacgatagtaataatttattcatataatcacttctaattctttaatagttaacattttttcatgaaataagtttcttactaattttacattatattaaagctcagaaaatattcttatactcataagttattacatttgagctagtgagattttgttaataataaaagtgattctagtcgaagcaaggcatttaattgctgataaaggtaaaactgctagttatctaattctctcagtcattatgtatttgatctatttaacacatgaactaatagcagaaaatgaactgaaaggtacatatagctaataatgtaggggcaatccacatggccatgtttaaaaaatcaatataaacaatgtgaattctttcttccaaagaattcgatatctacagaaagggatttaaggttattgtaaggtaaatgaaagttacctgaaagaatctcagtttaatataaaattatgaattatcacaggagggatgaaataatgttaaagaaactgggaataggtttagtaacttccataattttgttgagtacaaatggtattgctgatgcatctactaacagcgtacatgtaaaaaatgaaatgatatctaagagcacaaaaaagtgcagtgactgttggcgtgttggtcaatctagaacagaagatggagttgcagcaaagcatacaacaatagatggagaaaaagttgtcaaatatacagtacagggcaatggaaaggttagaatggatgtcattggtaaaggatttgctgaaattaaagtaactagggagaatgggaaaagtgtatattatcagtttgaggtaatttaattagtaatcaaatataggttttcattttagaacgttgccttcctataattaggaaggcttttatcattttagccaagaagactccttcctcaaggaacgcgaagtgagtaggtgggagatgaattggcttcgaacaagggatggcaagaagccatcttaattgttcgacatacataaagtgttacttcactatccatcgaatgtacgtttggtatataatagtcatataccgaaatggaagtgaatcaaatgataattaataaagcctataagtttcgtatctatccaaatcaagcacaagcaattctaattaacaaaacgataggttgttctcgctttgtattcaatcatttcctatccctatgggatcacgcatataaagaaactgggaaaggtttaacatatggtacatgctctgccaaacttcctgccatgaagaaagaatttgtttggctaaaagaagtggatagtattgcgattcagtcgtctgttcgcaaccttgcggatgcgtatacacgctttttcaaaaaacaaaacagcgcaccgcactttaaatctaagaagaacaacgtacaatcttataccacaaaacaaacaaatgaaaacattgccgttgtagggaacaatattgaaggtcttttaaatgaaaataacctaaatctcggatacataaatcatttgctgtcacagttggggcacacaaagagccgtaagtgcgatcatgttgtttacctggacctgtatgaatatgaaggaactgtccacttaacaaatcatactcaagttgaatttttatcccagctgtatggctacatcctcctgcacctggataaaccgatgaaaatacatcagggagttgaaatgcagttgaatctaaaatacgaatacgcttaaaaacagaagtatatggagaagaaatcggtatagatgaggtcaattttcggcttagtagttcagctagtatgtgttgtagaaattggacggctgctttattaaatcgttggttcagtccctcgggactgatgagcacttctgtcgaggcttctaaacagctagataactgagttaaagacgtcgtagcgatattttggttcatccatacacataaagcgactaaatcttttgcttggtacttactggttcgttgtacgaaaccaacatctcgagcaagattccgtaaggtatttggagataaaaaacgttgaatctcttgagcaaatagttgtaattcatcagaaacagacataaaaaacgccatcctttcctatgattctacagaaagaatagcgtttttttctctttatggatacatttttttagctcgatagcgatgtggtgttacctcaaatataattattttatttgaaggtcccttttaaatttttattaaatcttttcataggttgatatacaaggacgtgtaatgataaacctatcactgcagtaatgttcaaaataatacttataatcattaaagaccattctataactggagaaaagtatccgttcgtgcttaatgtagaagaactgatacctagtagtaaaatcactattagtaaaggtaagtttttaaccaatttgaatcccccttttaaatataatatctttatattattatatcacactggattatgtaattaatataagatagttatctatgagaatttaacatattttctctttttgggggtgacctacttctttagcttgatagcgatgtggcggtaccccatgcccatcaacttaagaatttgcactacccccaagtgtcaaaaaacgttattctttctaaaaagctagctagaaaggatgacattttttatgaatctttcaattcaagatgaattacaactattttctgaagagctgtatcgtcatttaaccccttctcttttggaagaactcgctaaagaattaggttttgtaaaaagaaaacgaaagttttcaggaaatgaattagctaccatatgtatctgggtcagtcaacgtacagcgagtgattctctcgttcgactatgcagtcaattacacgccgccacaggcactcttatgagtccagaaggactcaataaacgctttgataaaaaagcggttgaatttttgaaatatattttttctgcattatggaaaagtaaactttgtaaaacatcagccatttcaagtgcagcactcacgtattttcaacgaatccgtattttagatgcgacgattttccaagtaccgaaacatttagcacatgtatatcctgggtcaggtggttgtgcacaaactgcaggtatcaagattcaattaggggtaccgccagcatttcggaaaaaaaccacgctaaggattttttctataaaaagagccgttatattaagaataaatcctcctcgtatattaatatttaagtcctatttcagacttagattttttctttaataagagtcctgtaataaataaaatacttggacgtctcaagatatttctagataatggtcttaggatcatttgggacaattcttattcctcctgtggacttatcacataacttagagtgtttctcagtgaacgtgcgggactccctactcgcaggctgagcagcctgatcctcgaacctagatgttagtagctctagggcggctttcgattcaggacaagctctcatacacgaggttgttggtcggcgtacacactagagatatctcgagacgtccaagcaatgattctaaatagaagggaggtctcttacatgagattatttgttggtttagatgtaagttcgtttgatataaaagcttgtattttaaatggtgaaggtaaaaagctagatttcttttcggtcaacaacgacttgccaggtgccacagcgctcaaagagcgagtgttacagtgtatagctaaccaagaaattgaaacttttaaaatcggcctagaatccacatctgtttatagttttcatccatctatgtttcttcattatgatgaagacttacaacgctttggagcaaaggtatttctaatgaatccaaaacaaattgcaaattttaagaaaagctattctgacatggataaaacagatgagattgatgcctttgtcatcgctgactatttacggtttggacgaaatcaaatgtctatcgtaaaagaaagtcagtatgtggcactccagcaattaacaagatctcgttatcagctcgttagaatgttgacaaaggaaaaacaacattttctccaacacttaagttataaatgtaatacgttctcacaagaagtggattcttctatctttggcaacgccatgatggaactatttcttgagaaattcagtctagaagagctagccgacatgcctttagaggaactcgctgagttcctacaaacgaaagggaaaaatcgattcggtgacccgaaatgtgtcgcatcaaccattcaaagggctgttcgctcttcctatcgtttggataaggtcgtagaagactcaatcgatgttcttctaggaacatcaattgcggttattcgtacctatcaacagcaaatcaaagaaatagaaaaatccattaagcgaatcatggctggattaacccaaacactcgaatctattcctggaattggtcctgtattcgccgccggtattatcgctgagattggtcaaatcgaaagatttgatgatgaaaccaaagtagcaaaatatgccggactatattggcgcacgcaccaatctggtcgattcacagcagaaaacacttcattatcccgtaatggaaatcattacttgcggtattacttagttgaagccgccaactctgtaagaaggcatgtatctgattatcaagaatattacgtaaaaaaatataatgaagtaccaaaacatcaacacaaacgtgcactcgttctaaccgcaagaaaacttgtgcgattggtggatgcgctactacgtagtcaccaactctttacgccagaaaggtgcgtgaaagtgtgacataaaacttgtcatcgctacctttcaattattttccagtaaattacatatattactggtttagtttcgtgatgtcttttttaagcaaataggcctttgataactttaaacgtttatattttttagttgacatattaccgcaggtctattaacagtgagtctatcttatgattacatgaatgatgcagagaaacttcctaagatttataacaagttcaaaggacaggccccagatgtgattgagaacgggtggttacaaactcgacttaagaaagctacattaaacgttttctctaactattcagttcttgaagtattccaacatcaaggggaaattaatggggcaatagaaaaggagtttagaaaaatggtagatactactggcttcttagtagattctgttacgttagaagctcctaaaccagatgcaaatacagcaaaagcgattcaaggagtagtagatgctcaacaaaaccttgaaaaagcagagattgagaaaaagcaagctacaatcaatgcagagaaagccattgaggaagcgagaggaaaagctgaagcaaatgagattattaagaagtctttaactccagaaattgtagaaattaaaaaaattgaaaaatgggatggcaagttaccacaagtaagtggagaagctaatccattggttcaagttaaataaactatatttccaggactttcttaaatgagggagtcctggaatgttatcaaatttgaattttgttaagaaacggggagtgttgatatggataaagaaaaagctcttgaatatttgaagggtatatctgattgggaatttattgagatagcacaggaagtagctgaacatcatctcggggatagatggttagatccagaaataaagaatcaatgtggcccgtcaacagaaaagtcattgctaatgattacatggacaaaaagtttttaacaaaagcgttattttaatcggaatggcaggtaattgaccaaatcacctgccaaatgcctaaacagtccggaggggtaaagctccgttttgaaagaatgtagctgactcgtagatagtatgtgtaatgtaaaaaaaattattcgtaaaggagaatgagagatggaagatattaagtttcgggcgtgggacaaggttatggagaaaatgtatgaagtcggatttatagactttgctaaagaaagagtgcaattggcacatatcgttgatggcatttgttatgcggtgtatatctctcctttgaaagatgttgagttacttcgatacacgggaattgaggatgtaaaaggcagtgaaatttacgaaggggacattgtctatcaagaatttcatgatcgtatggaagaaacagatggattcacaggagcagttaagcagatggaaggcgcttggtggatttgtaacggagtggatcatgctgaattgctgtggagtgaattaaatctaaatcatgtaaaaggtaatatctatgagaatgtagagctattagaaaactggacaaaatagttattttgggaagatgaaaattaaagagtttataattcttaagcttatgtatataaaaaataatcataaaaagaatatggcatacaaaaatgcagcatatataatccaggcaaatgtaaagatgatgaattttagaattttcataattagtccttttaggtatagagtgcacaatgctggagaatttattaatttttttacaaaattcttattttagataaaggtgagacagaatgataaagataagtaaatctgaagattttgaagaaaaattacaaagacacaacaagagaatggaagaagatgaattatatagagaagcaacaaaaatgcttacatttcctgctggtcataagcttgaattggtgatcggattgtacagcacttaccactaaatgagaatggttggcatgccggagacgggaatggagcgggtaatcgctcgtctatcggcattgaaatttgtgaaaatcgtgatggtaattttgaaaaagccttaacccatgctgcgggtctcgttaagtttctcatggctcaccttggattaaagattgggaacgtagtttcccatcaacattggagtggaaagaactgtccacgtccgatatttaatcgaccaggtggatttgagggtttcaagaggatgattgaagatagtctaaacgatatggttgtagagaatcataacaaggatgcgggtacacaaggattaggaattgcttacatggaaggtgtaaatattaaccttcgcagaggacctagcacgagtagtgatgtaattcgtaaattgaacaaacctgaatcttatattgtttgggaagaacgtgagggctggctgaacctaggtaattcatgggtgaaatatgactcttcctatatttactttgcccgtagacaaacgagtaatattggtaaattagtggttgtagatacaaacgaattatgggtctatggttctgctaattggaatgataagattaagactgtaaaaaaaggggaagcatttacaattcaagatgaattgcaggtaaatggttctaacatgtataagtgtaagtatttctacattaccacaaattctcaatttgtatatgtaaaataggaaaagtggattttatatataagtataaaaagtaataagactttaaaataagttaacggaatacaaacccttaatgcattggttaaacattgtaaagtctaaagcatggataatgggcgagaagtaagtagattgttaacaccctgggtcaaaaattgatatttagtaaaattagttgcactttgtgcattttttcataagatgagtcatatgttttaaattgtagtaatgaaaaacagtattatatcataatgaattggtatcttaataaaagagatggaggtaacttatggataacaatccgaacatcaatgaatgcattccttataattgtttaagtaaccctgaagtagaagtattaggtggagaaagaatagaaactggttacaccccaatcgatatttccttgtcgctaacgcaatttcttttgagtgaatttgttcccggtgctggatttgtgttaggactagttgatataatatggggaatttttggtccctctcaatgggacgcatttcttgtacaaattgaacagttaattaaccaaagaatagaagaattcgctaggaaccaagccatttctagattagaaggactaagcaatctttatcaaatttacgcagaatcttttagagagtgggaagcagatcctactaatccagcattaagagaagagatgcgtattcaattcaatgacatgaacagtgcccttacaaccgctattcctcttttggcagttcaaaattatcaagttcctcttttatcagtatatgttcaagctgcaaatttacatttatcagttttgagagatgtttcagtgtttggacaaaggtggggatttgatgccgcgactatcaatagtcgttataatgatttaactaggcttattggcaactatacagattatgctgtacgctggtacaatacgggattagagcgtgtatggggaccggattctagagattgggtaaggtataatcaatttagaagagacctcgtatagtatgtttaaacttaatttttttactttcatgagagacctgtaaaataactcttggacgtctcaagatatttctagataatggtcttaggatcatttgggacaattcttaccgctcctgtggacttaccacataattaagagtgtttctcagtgaacgtgcgggactccctactcgcaggctgagcagcctgaccctcgaacctagatgttagtagctctagggcggctttcgattcaggactagctctcatacacgaggttgttggtcggcgtgcacactagagatatctcgagacgtccgaggaatgattctaaatagaagggaggtctcttacatgagattatttgttggtttagatgtaagttcgtttgatataaaagcttgtattttaaatggtgaagggaaaaagctagattccttttcggtcaacaacgacttgccaggtgccacagcgctcaaagagcgagtgttacagtgtatagccaaccaagaaattgaaacttttaaaatcggtctagaatccacatctgtttatagttttcatccatctatgtttcttcattatgatgaagacttacaacggtttggggcaaaggtatttctgatgaatccaaaacaaattgcaaatttcaagaaaagctattctgacatggataaaacagatgagattgatgcctttgtcatcgctgattacttacgatttggacggaatcaaatgtccatcgtaaaagaaagtcagtatgtggcactccagcaattaacaagatctcgttatcagctcgttagaatgttgacaaaggaaaaacaacattttctccaacacctaagttataaatgtaatacgttctcacaagaagtggattcttctatctttggcaacgccatgatggaactgtttcttgaaaaattcagtctagaagaattagctgacatgcctttagaggaactcgctgagttcctacaaaagaaagggaaaaaccgattcggtgacccaaaatgtatcgcatcgaccattcaaaaggctgttcgctcttcctatcgtttggataaggtcgtagaagactcaatcgatgttcttctaggaacatcaattgcggtgattcgtacctatcaacagcaaatcaaagaactagaaaaatccattaagcgaatcatggctggattaacgcaaacacttgagtccattcctggaattggtcctgtattcgccgccggtattatcgctgagattggtcaaatcgaaagatttgatgatgaaaccaaggtagcaaaatatgccggattatattggcgtacgcaccagtctggtcgattcaccgcagaaaacacttcgttatcccgtaatggaaatcattacttgcggtattacttagttgaagccgccaactcagtaagaaggcacgtatctgattatcaagaatattacgtaaaaaaatataatgaagtaccaaaacatcaacacaaacgtgcactcgttctaaccgcaagaaaacttgtgcgattggtggatgcgctactacgtagtcaccaactctttacgccagaaaggtgcgtgaaagtgtgacataaaacttgtcatcgctacctttcaattaatttccagtaaattacatacgttactggtttagtttcgtgatgtctttttttagtaaataggcctttgataactaaaaattcttttgtttttcagttgacatactaccgcaggtctttggtacaatacgggattagaacgtgtatggggaccggattctagagattgggtaaggtataatcaatttagaagagaattaacactaactgtattagatatcgtttctctatttccgaactatgatagtagaacgtatccaattcgaacagtttcccaattaacaagagaaatttatacaaacccagtattagaaaattttgatggtagttttcgaggctcggctcagggcatagaaagaagtattaggagtccacatttgatggatatacttaacagtataaccatctatacggatgctcataggggttattattattggtcagggcatcaaataatggcttctcctgtcggtttttcggggccagaattcacgtttccgctatatggaaccatgggaaatgcagctccacaacaacgtattgttgctcaactaggtcagggcgtgtatagaacattatcctctactttttatagaagaccttttaatatagggataaataatcaacaactatctgttcttgacgggacagaatttgcttatggaacctcctcaaatttgccatccgctgtatacagaaaaagcggaacggtagattcgctggatgaaataccaccacagaataacaacgtgccacctaggcaaggatttagtcatcgattaagccatgtttcaatgtttcgttcaggctctagtagtagtgtaagtataataagagctcctatgttctcttggatacatcgtagtgctgaatttaataatataattgcatcggatagtattactcaaatccctgcagtgaagggaaactttctttttaatggttctgtaatttcaggaccaggatttactggtggggacttagttagattaaatagtagtggaaataacattcagaatagagggtatattgaagttccaattcacttcccatcgacatctaccagatatcgagttcgtgtacggtatgcttctgtaaccccgattcacctcaacgttaattggggtaattcatccattttttccaatacagtaccagctacagctacgtcattagataatctacaatcaagtgattttggttattttgaaagtgccaatgcttttacatcttcattaggtaatatagtaggtgttagaaattttagtgggactgcaggagtgataatagacagatttgaatttattccagttactgcaacactcgaggctgaatataatctggaaagagcgcagaaggcggtgaatgcgctgtttacgtctacaaaccaactagggctaaaaacaaatgtaacggattatcatattgatcaagtgtccaatttagttacgtatttatcggatgaattttgtctggatgaaaagcgagaattgtccgagaaagtcaaacatgcgaagcgactcagtgatgaacgcaatttactccaagattcaaatttcaaagacattaataggcaaccagaacgtgggtggggcggaagtacagggattaccatccaaggaggggatgacgtatttaaagaaaattacgtcacactatcaggtacctttgatgagtgctatccaacatatttgtatcaaaaaatcgatgaatcaaaattaaaagcctttacccgttatcaattaagagggtatatcgaagatagtcaagacttagaaatctatttaattcgctacaatgcaaaaccctctgatataatcagtcttataaattataagggctggtatataaatgaaattagatagtaataaccattcagtattcttgttatattatcaccttgtgttggtcgtgaaatacagaagaaatgtgtttgatgatgatatgtcagactatgcaaaagagatgtttgttcgactatctgaaaactataacatcacgttagttgaatggaatcatgatgtagaccacgttcatattttgttcaaggcacaccctaatacagaaatgacaaaattcatcaatgcttataaaagtgcaagttctcgacttattaaaagagactttccacaagtgaaaaagaaactttggaaagagatgttttggtcaagaagtttttgcttgctaactactggtggttcgccaatagacgtagtaaaaacatatattgaaaatcaaagtgaaaagtgaggtgaaatgatatgacaaagcagaataaagcatataaattccgtttgtatccaacagaagaccaagcacatcttatgcgtaaaactttcggttgtgtacgtttcgtgtataacagaatgttagctgaacggaaagaagcgtatgaaaaacataaagatgataaggatcaactaaagaaacaaaagcttcccactcctgcaaaatacaaagcagaatttgagtggttaaaagaagtggattcattagctttggcaaatgctcaactaaacttgcaaactgcctataaaaatttctttcgtggtcaaaatgacttcccaacattcaaaagcaaaaaagacagaaagtcttatacaacgaatgtagtgaacggaaatattatgttgcttaacggtcatatcaaattgccaaaactgaaaatggtacgtatcaaacagcatagagaaataccacaagaccatataattaagtcatgtacgatttctatgacacctactggtaaatactatgtgtccattttgactgaatacgaaaaagagatcgtacaaaaagaagtagaaacagttgttggattagactttgcgatggaacaattatacgtcagttctgaggatgagagagccaattatcctaagttctatcgtgaaatgttagaccgattagcaaaggctcaacgagtattatcaagacgtacaaaaggttcagggcgttggaataaacaacgtatccgtgtagctaagctgcatgaaaaagtagcaaaccaacgtaagaacttccttcatcataagtctaaagagttagctactcattttgatgttgtagctattgaagatctaaatatgaaaggaatgtcgcaagcacttcattttggaaaaagtgtcgctgacaatgggtggggtatgttcacttcttttttagcttataaactacatgaacaaggcaaacaacttgtgaaaatagacaaatggtttccttccacaaaaacatgtagcagttgtggaaatatgaaaaatatgtcattgtctgagcgagtctattcttgtatatgcggtgtaaatctcgatagagattataacgcagctatcaatatcaaaaatgaagcaatacgcctattggcgttagcatagatagcaataaaataacccttggaacaagggagttagctcggctgtcttaggacgaattcgttagctaccaaaagtaacgactaaccgagaagcccccacttcaaacagtccgttaggaacgaaacaaacaacgtgaaacgtcaatttttattttagatgctagacaaactaactttattggagagtttgatcctggctcaggatgaacgctggcggcgtgcctaatacatgcaagtcgagcgaatggattaagagcttgctcttatgaagttagcggcggacgggtgagtaacacgtgggtaacctgcccataagactgggataactccgggaaaccggggctaataccggataacattttgaactgcatggttcgaaattgaaaggcggcttcggctgtcacttatggatggacccgcgtcgcattagctagttggtgaggtaacggctcaccaaggcaacgatgcgtagccgacctgagagggtgatcggccacactgggactgagacacggcccagactcctacgggaggcagcagtagggaatcttccgcaatggacgaaagtctgacggagcaacgccgcgtgagtgatgaaggctttcgggtcgtaaaactctgttgttagggaagaacaagtgctagttgaataagctggcaccttgacggtacctaaccagaaagccacggctaactacgtgccagcagccgcggtaatacgtaggtggcaagcgttatccggaattattgggcgtaaagcgcgcgcaggtggtttcttaagtctgatgtgaaagcccacggctcaaccgtggagggtcattggaaactgggagacttgagtgcagaagaggaaagtggaattccatgtgtagcggtgaaatgcgtagagatatggaggaacaccagtggcgaaggcgactttctggtctgtaactgacactgaggcgcgaaagcgtggggagcaaacaggattagataccctggtagtccacgccgtaaacgatgagtgctaagtgttagagggtttccgccctttagtgctgaagttaacgcattaagcactccgcctggggagtacggccgcaaggctgaaactcaaaggaattgacgggggcccgcacaagcggtggagcatgtggtttaattcgaagcaacgcgaagaaccttaccaggtcttgacatcctctgaaaaccctagagatagggcttctccttcgggagcagagtgacaggtggtgcatggttgtcgtcagctcgtgtcgtgagatgttgggttaagtcccgcaacgagcgcaacccttgatcttagttgccatcattaagttgggcactctaaggtgactgccggtgacaaaccggaggaaggtggggatgacgtcaaatcatcatgccccttatgacctgggctacacacgtgctacaatggacggtacaaagagctgcaagaccgcgaggtggagctaatctcataaaaccgttctcagttcggattgtaggctgcaactcgcctacatgaagctggaatcgctagtaatcgcggatcagcatgccgcggtgaatacgttcccgggccttgtacacaccgcccgtcacaccacgagagtttgtaacacccgaagtcggtggggtaacctttttggagccagccgcctaaggtgggacagatgattggggtgaagtcgtaacaaggtagccgtatcggaaggtgcggctggatcacctcctttctatggagaattgatggttttgatcgcctgatatctgaattagagcaaatgggtttacgtggagaaaagattgaagataaagcccttgcagctggtggtgagcaaattcgaaaagccattgcagaaagaagtgaaccgaggagttcaagtcctaagaaaccgtctaaaagtgaaccttggcgtacaggccaacatttgcttgataatatacgagttacgaaggcacgaatggaaaatggtgtgaagacgatcaagattggaatagacaaagcggaccgttctccatatttctatggaaagtttttagagtggggtacttctaaaatgccagcacatccatttatagaaccaggttttaacgcttctaaagcggatgcggtacgtgctatgacagacatcttaaagaacgagatgaggctaaatgtatgataaatttacgccctgaaatcgtgcaagctcttgaaaataatcaggagcttgtttccttattaggtggaaaacgtgtgtattatcgtaaagccaaaaacgctgaagagtttccgcgtattacgttttttgaactagacaatagaccagatggatttgcggataatgatgaaagtgaaagtgaaatcacattccaaatcgatatttggtcaaaagggagtacaacagcaatccatcaaaaagtaaatgaaatcatgaaagatattggtttctcacgttatgcagtagctgatttgtatgaaaatgatacacaaatttttcattacgcgatgcgattcgcgaaaggagtggagttataaatggctggagaaattattacaattagttcgactgtcggtgtagatagtcttgtttatgcaaaactattaaaagatgatgcatcaggtgtttcatatgcagatgtaaagaagttagaaggggcagtgaaggttaaaacttctaaaaaagtagcttcagaaattatgtggagtgataataaaaaatcagagattgctgaatctgacggagaagtggaagttgaaattgaagttcgtggactttccttatcagcgaaagcagatattgaagggtatccagaagttacagacggcgtattagatgaaaaacgagagggagaaaagccatatttagcaatcggatggcgtttcttaaagggcaatggaaaatatcgatatgtttggttattaaaagggaagctttcacaagaggaagaagaaggcgaaacgaagaaggataagcctaacttccaaacaacaaaactgaaaggttcatttattgaacgagactttgatgatagaccaaaatttacagctgatgccgatgagcctacatttacaaaagccgttggtgataactggtttaaaaaggtatatgaaaaaatagcaacaccaccagcaggaaaataagggggagcaaaagctctctcttttttattaacgaggaggaaaagccatgaaattaacactaataattaaggaagaaaagaaaacttttcatttaccggagtttattccagcacgtttaattcgtcaagcacctgaacttgctgatattccaaataatcctggtcctgaggatatggataaaatggttcaatatgtagtaaaagtttacggggaacaatttacattagatcaatattgaaagaccaactatgagaagtcaaggggagttttttatataaatagggggtgtttttctaaaaaagggcgtgccaaataaacctaaggattttcaaaaaaaatgaaaaggtcatgtttctgttgtgtgaggtggtacttcataaggcttattgcttttaagaatggcatagataatgtaacacagctttctagctaccgcccctatacaaacatagtagtgctttccttgctttcgtttcttttcataaaaagcttttaatacagggtcatgtttatgcgctgtaatagccgcttggaataaggctctacgcaaatgagaagaaccacgtttggatatagacgtacctgaggcttcaaattgtccagattgggacacagaggcatcaatgcctgcgtaagcgacaagtttagatggtttgtcaaagcggtgaatatccccaatttcacttagtatagtggctcctaaaatgggcccaacaccaggtattgtcatgataggagtatctaaatcaattaaaagttgtgacatttcttcttcacattctttgatttgatcttcgataaaacgaatttgttccatcaacatttttagttggaaggaaaaagcgtctttacagaaggtaacaccaaacgaattagaggctaattccattagcttgttggctgttttcttccccagtcgattacgactggtttgctcaattatttgtgttaaatcatcaatagatatctgttcatagtcactaggagaggcatattcaagtaagatttgcgaagaagttttaccaaaaacatccgaaaagatgctttggtactctgggaaagtctgatctaatacgacaagagcttttcgttttaaatcactcatattacttacaagcgcattacgaaagcggctcatttgttttagagcgaacattttctcgtccacaagtggggtttcaacaaaacggccgaatcgaatgatatcggcaatcatagtggcatcaatggcgtctgtttttcgctttctaatttctgttccttttcgccaagcattggtttgaattggatttaatacaacgactgagaagccatgatcaagtagaaaagaataaacggctaaccaataatgtcctgttgcctccattccaatcagtatttctgtaggagactcaatatattggtacatccaatttaacagtgcttgtccgccttctttatgattctgaaagggaaatggcttagtaataggttttccagtttggtcgataatggacgcataatgtttatgtttagcgatatcaatacctaaatagaacatagcttacacccctattttaatcagtgttagatagtgttgtcctcctctgaactaataagcgctactacctcgtaagagatacgaagaatgaccaatggtcatcaacatccaactcattcgtaaactacttattagacagaggtaccattctttcaaccgaatacaaagattcaaggaggtggtcggcaacactctatctacaaatataagtatctcatataactagatactcacgggtttataggtaaatccctttcctaaaaaacctaactttatcatacgaggcctcgtatgattaagttaggtttttagggacgggatgtacctataaatccaagggtatctatttttatgagatactaatatttgtagatagagtgttgccgaccatctccctgaatctttgtattcgtaaaaaagagcggtacctctgtctaataagtagtttacgaatgagttggatgttgatgaccattggtcattcttcgtatctcttacgaggtagtagcgcttattagttcaggggaggaaagcactatctaacactaattaatataggggtgtaagctatgttctatttaggtattgatatcgctaaacataaacattatgcgtccattatcgatcaaacgggaaaacctattactaagccatttccttttcagaatcacaaagaaggtggacaaacccttttaaatcagatctaccaatacattgagtctcctacagaaatactgattggaatggaagccaccggacattattggttagctgtttattcttttctactggatcatggattttcagtcattgtattaaaccccattcaaaccaatgcctggcgaaaaggaacagaaattagaaagcgaaaaacagacgccattgatgccactatgattgccgatatcattcgatttggccgttttgttgaaaccccacttgtggacgaaaaaatgttcgctctaaaacaaatgagccgctttcgtaatgcgcttgtaagcaatatgagtgatttaaaacgaaaagctcttgtcgtattagatcagactttcccagagtaccaaagcatcttttcggatgtttttggtaaaacttcttcacaaatcttacttgaatatgcctctcctagtgactatgaacagatatctattgatgatttaacacaaataattgagcaaaccagtcgtaaccgactaggaaagaaaacagctaacaagctaatggaattagcctctaattcgtttggtgttaccttttgtaaaaacgctttttccttccaactaaaaatgttgatggagcaaattagttttatcgaagatcaaatcaaagaatgtgaagacgaaatgtcacaacttttaattgatttagatactcctatcatgacagtacctggcgttggaccaattttaggtgccactatactaagtgaaattggggatatacaccgctttgacaaaccatctaaacttgtcgcttatgcaggcattgatgcctctgtgtcccaatctggacaatttgaatcatcaggtatgtctatatctaagcgtggctcttctcatttacgtagagccttattccaagccgctattacagcccataaacatgaccctgtcttgaaagctttttatgagaagaaacgaaaacaaggaaagcactactatgtttgtataggagctgtagctagaaagttgtgttacattatctatgccatcctaaaaaacaataaaccgtatgaaatccctcaatattcaaaagaagtttgatacttttatttttttaacatctcttagggttatttggtgcaccctttttttaatttcctatttataaaattcctcttgacttctcatagttggtcttttttcttctttcgtttcagcttcacaaaattctaatttaaatcctgattctgtaacaatatccaccatgtatgtatctatgagtggctcgtaaataaaatcatgatctattgtgatttgttcagtcatttgattcaccttctatcggtgaaagcgtaataatcatttgttgatctaacacattccctattacagcattcatccatagattaggattcatttttctcattaaaaattcgatgactgtgattaactcttcagtagataaggaaacaaattctcctaaaggttcttgattaaacttaccaccacgtttttcaatcgttagagctactccgttgtcaatcacgtatctttttgcagtaactaaatcgaattgacggactttctcgcggccgaatccttttattagttcctttagaacatcatgaatgacacgaaaatctaacacttttactttctgttcaagctgctctctacactgcttgcataaagtcctctccaaaccagaaatatatattttactcatatcagactcaggaaaaggattttcgcattcataacattcttctccaattacatcttcaaatggatttagcatgtaaatcgctcctatgatttatatttgtttagcacttcttgcaatctctcacgctcttcatcaatagattgcgagttttgcttttcgatttcttttttagttggctcaacatcttcacgtaaccattctggaacaatttcttttctatttgaacgaccaggtcccgaaccattcaatcgcttgttcttactcatttcaaagcgtctatctaatgcagcaacatcatctaatgtttttactttttgcttttcccagcttttcaaaatggccttaatgtaattccattttggcttattttcatcaatagctttgtgagcagcatgtttaattagttcgctaccaaacgaatcacaaaactctcctaattccgtaatggcaatttcacttaatggaattccttcaccttttaaaaagttataactgactttaaattcttcatcgactaatacatgtgattttgattctttattatcatcatgataataattagtattttgtatattattagtacttagtaaagaattagtatttagtagtcggcatttttccatagggtggttcgtccactcggtggtttcaccatcatgtggttcatccatagggtggcttttccactcagtggtttcaccactaggtggtttatccaccctatggtttttggtatctatggttggtaattcataaacaatggtttcccaatgtgaaatttttcctgtttctgaattttggattggatatctcttcaaataccctgcctttttcaattcttttaaggtgcttgttgttgttttctcgctatccttggcatgttgacttaattcagtagcatgaaatgtccaatcgtccggtaaagaaagcatgtaggctaataatcccttcgccctccaacttaagttctcatcgcgcaaaggcgtattgtgtatcaccgaataattcgtatcctttttcactcgaaaaatacccatatttcctacctctcctattagtgctttattttcgattacaagtaaagcatataccaaataaaaaaagaaaaagcagagatattttcatcgataggtgaaaatatctctgcttgattaagttgctctatacatatgtattactagaaaataacatagtaaaacggacatcactccgtttcaatggaggtgatgtccgtttttcattacaacaaattacttatctatttgtaatgctgctcttggacaattgatttgaaaacgatatttaaacctgagtttgcatgagactattcctccataaggagtaattccacgctgtccacgataaatgttccttccgtttctccaatctcaatccataccttatcggtttctgggaagtattctaattcttttgtcacataaccaactggtagtggcgtgtaatccctataccctctgttaaattcacaaggattctctcttcgtccatctgtatacgatttttcttcatagactgacgcataatcagctggtacggaaggagcttcgttatatcctcgattacgagaagtgtacgcacctccgtattcttcttgatttacagtataatcattacacgttaccgtgttatttggatagatttcctcttctacgcagttgctaaacttcagttcgtctgtattgttctcgatctcatgaatggttacgcaaccttctccatatccctccttgtacgctgtgacacgaaggatatagccacgacccggacagacacgaacttcttgtgacacttctgcttcccattccggaacaacaaggaccgaacgttggttgttttgttcttctacatctacatgccctttcacgttccagcaggataagccattattaaaatcaccatttttaatgacatttctcgcatcatatagggagaatgcagtgaaaatacgcccttctaattcttcaaaaatagccgcattgacacccggaatcacagacagctcaggcagataagcttctcgaatgctatgaacacgtttatctgccgcatgaatcatggcaatattcgtatccgcttgtaattgatcatattgagagtttacaaataaagcatctacagattcttttgcctctttataaacgatatttgtttcccattccaatttttcacgtttgtctctccattttttctccgctcttttcacacgagctagcgcttctcctactaatggtttctcttcgagaaactctagattccctagtcttgcgtgcccatcttgcgtcttaatcttaaagatcacccatacacctaggtcctcatttaagtctgtacatcctacatcaatgtctaaggagaaatgatgcgaatgatgggcacacttttctccatccctacacgaacaatctaagtcaggattccattcaaggtgtggcgcgcatcgattcggctctccacactttccgattggactttgggctgaaagcggccataaggaacccgtacctggcacatttactgtttcatgttttgcattgtagcgaattaaatagatttctaagtcttgactatcttcgatataccctcttaattgataacgggtaggtacctttgatgagtgctatccaacgtatttatatcaaaaaatagatgagtcgaaattaaaagcctatacccgttaccaattaagagggtatatcgaagatagtcaagacttagaaatctatttaattcgctacaatgccaaacacgaaacagtaaatgtgccaggtacgggttccttatggccgctttcagccccaagtccaatcggaaaatgtgcccatcattcccatcatttctccttggacattgatgttggatgtacagacttaaatgaggacttaggtgtatgggtgatattcaagattaagacgcaagatggccatgcaagactaggaaatctagaatttctcgaagagaaaccattagtaggagaagcactagctcgtgtgaaaagagcggagaaaaaatggagagacaaacgtgaaaaattggaatgggaaacaaatattgtttataaagaggcaaaagaatctgtagatgctttatttgtaaactctcaatatgatagattacaagcggataccaacatcgcgatgattcatgcggcagataaacgcgttcatagcattcgagaagcttatctgcctgagctgtctgtgattccgggtgtcaatgcggctatttttgaagaattagaagggcgtattttcactgcattctccctatatgatgcgagaaatgtcattaaaaatggtgattttaataatggcttatcctgctggaacgtgaaagggcatgtagatgtagaagaacaaaacaaccaccgttcggtccttgttgttccggaatgggaagcagaagtgtcacaagaagttcgtgtctgtccgggtcgtggctatatccttcgtgtcacagcgtacaaggagggatatggagaaggttgcgtaaccattcatgagatcgagaacaatacagacgaactgaagtttagcaactgtgtagaagaggaagtatatccaaacaacacggtaacgtgtaatgattatactgcgactcaagaagaatatgagggtacgtacacttctcgtaatcgaggatatgacggagcctatgaaagcaattcttctgtaccagctgattatgcatcagcctatgaagaaaaagcatatacagatggacgaagagacaatccttgtgaatctaacagaggatatggggattacacaccactaccagctggctatgtgacaaaagaattagagtacttcccagaaaccgataaggtatggattgagatcggagaaacggaaggaacattcatcgtggacagcgtggaattacttcttatggaggaataatatatgctttaaaatgtaaggtgtgcaaataaagaatgattactgacttgtattgacagataaataaggaaatttttatatgaataaaaaacgggcatcactcttaaaagaatgatgtccgttttttgtatgatttaacgagtgatatttaaatgtttttttgcgaaggctttacttaacggggtaccgccacatgcccatcaacttaagaatttgcactacccccaagtgtcaaaaaacgttattctttctaaaaagctagctagaaaacttccaccctcttttgtcatatcaagcgataactgctgtctatcccataacacaactgcttctttcaggtccccaacaataaatggtgctttaccatctttatctgtagcaattgtcttattggataaaacaataactggctttcctgacagtaacttacgagttggatttgttggatctggttgaagaagtggacgaccatccttatcttctaattgatctaagtaattgaacccatcttggtttgtaataatgtttgctacagccgagaaagctgggtctaatgtgacatttaacgctgttttaatgcctttataatcctttaaatcaacttttgttaatttgttgatttcttgtaaaattaaataattacgagttgcaatagatttcttcgcaatccactgacgtaaataagcttctagcgcttgatccgtatcatttaataaatcatttggtacaggtagaaatcctgcataatcctcaataacatacggtaaacgatcaaattgtggcgaagcaatttcttgcattgcatttgggtttccatactcagataatggagcgaaaggtgtagatgctgcacgtttttctaatgtgcgagcgcccttattcgttgaaacaggttgcacatttacatattgctctaagttatcaaccgtttgttttaattgattaatcgttgtcgtaatatcttctggaacaatataaccgccgtctttacctgtattctcagataatgctgctttgtattcctgcataacgcttgcttcttcatgacttaaattttgaccacgtatagctttcataaacacttctttatacgatgaatcttcatttttaactgatgatggaggcaaaacccttgcttgtgaatttacagggtcagaaacttgaatttgcatcattgctagatagttatctaattcatttttcgcgtttttcgcttcttcaattttcgcttttgcatcttcatatttaccgctgttattaaactcttccgctttcgctttcaaatctgcaactttttggcgtaactcttgttcacgtttatccattccgtatttcctccttgttttggcacaaaaaatagacctataactctaacaggtctagtgcattttgtatttttaattgttcgttattatccttctttgaaatagaaggagcttttgctacaatcttatttggtgttttttgatatttatcaaagtaatcactgctacaagctgcgacttcttttgcttccacaacttcaatattgaagtatttttcagcttcttcaccacttaaccaggtctcagcatctactaattgctgaattacttcaatttcgatgccttctttcaagttttctttgtatacattcataattccagcctcaagattatccaagtcctctgccattttacgaagtacatttgcatttcctctacttacagtccatggtttatggaccattaaaaaagcattagaagggacaacaacacgatcaccagccaaggcgattacggaagcgatagaagctgcaacaccatccacataaacgatggcttcctgccatcccttgttcgaagccaattcatctcccacctactcactgggctgtgacccttcacgctccttgaggaaggagtcttcttggctaaaataataaataaaaaaagaggatcgccccatactagagcagatcctctctttcacttcacatacacataggcttcgtttgctgctatataatatgttttacctttactattgtgcactctatattgtggtgaattatttacaattacctttgtatcaataatgaatcctaaacccatatctacagtaccggcaacatctttatcctgccaagatggagaatcatagaaacgtaaattatttacttttgaaataactcttttaccaattactgtagcaggctcattaccttggtaacgaatatatgaagaatcataataaatccattgattaccaccaagatgtaaccagtttcctaatttaccccatactttataagcctcacctttttgtagcttacgaataatactattttctgttgatggtccaaagcggagatttacattgtatccttcaatatatgcaataccattcgactctactgtaccagatatttcatttgttgtttgtggtttggtatccactgtaaccgtgctccctttataaacctttaacacgtctgctcggaacttagcctcagatacgccatgactacgaagataatctattggatcttcatggtctgtcccacctaatttatacgtaatatccctatgtgtccataatcctttagagggatgaatatttcgttctcgcaagatttccccaattaattctatatatttttcatatgaacgtttaaatttcaatggatcacttgtctcacacaattccacatgaacaaatctagcatttgctgctggacctgccccccatgcctgatgttttgtagatgcaatttgaatcttctcatcccaatccactgcgtagtgaacaaacgctgaacgccatgtacgagactcatacttttgaatattaattgctggcgcctctggggtagctgtagaatgtgctacaacaccttcataagctccaacaccataacggtatggttgttttggtaaatcaggaataaatagaattctatcagcaaatacatttgtttcaattgataatactaaaataatagcaacaactatggataaaatatgcttgtatttctttttcattttctatcggcatccctttttataatttttgtatggtcaaataatccactagctgacaatccgataatcattccttgaaatagattcattttaatatcttgagacaaaaataaaacacctagcgtaatgccaagtgttaaattaaataacggaatatattttgtttgcagtccagttgtttttgcaatttgtgaaatccctacaacaaccccaatcattgctgtaatttcaatcattacatacctcctcctcgtatgataaagttaggttttttaggaaagggatttacctataaacccgtgagtatctagttatatgagatactatcaaacagtatcactttataagagatgttgaacgcttcgagtcaggggagtctattacacttccaattaattacggtatgattgcggaggactctgacgatgtattcaccacaccacagaaagacgctgtaacactttatagctcgtttgcaatttctattcaagcaatacaagaagttgactttaaagttaaaaatcttcaatttgaccacggtatgtggaagcaggaagttgacactcttaaagaacaacttgaagcagaaaaacttgagaaagtttcaatgaaagctgaaatttatgaattaaaggtattagtacaacaattaataaatgagaaaccagagcagccataagctgttttttattttgcataaaatacggctttgaatcaattcaattcatagatcaagaggagtgatttcgcttctctttttattttgaggagatgatcagtgtgaaacgaatagtagaccaagtaatttatgaaaagcatgttagccaagaaaacaaaaacctagtcaaagattttcttattgaaaagaaagcacaagggaaagcggcaagcactttaaaacaatatggttgggatttgcgaattattttgtttctaatacatcaacacttcgaaaataaaaatctgactgagttaacacgtaaagacatccgaaatttatctattatttttcaggagatgggaatgtcaaatgcacgtgtgaatggattaatgagcgcattacgttcagctcttgaattttgcgctgatgatgatgactatgagtatgaattcaatgtaggttcaagggtacgtggtttacctaagaatccaattagagaaattacatttattaatgatgaccaaattaattggttaattgatgaattactggaaaaagagaaatatatgttggcaacgtatttaactctttcttattacagtgcagcgagaaaaaatgaagtttaccaggttcagaaggaaggactgacagaacaatattatacaaatgtggtcagaggaaagcgcggtaagaagtttagattatattacaatccacgagtacagaaatgtattcgtttatatatagatcaacgaggtaaggatgccattccggatttgtttgtacgagtttataagaatggtgagagaagacaattaaacaaaagtgtatttaattattggtgcaagatatttgctaagatgctgaacgaaaaggaagggaaagagtttaaagtcaatccccactgtttccggcatagcagattagataatttaaaggtgcaaggtgtaccactcgaaaaattaaaatcgcttgctaatcattctgatatttctacaacggaatcttatctgaaggatagaagtgaagaagatattgcagagatatttgggatggatccaagttgctttgcagcttaatcaggagcatatgtatgcttctttttttattgataaaaagaccaactatgagaagtcaagaggaattttataaataggaaattaaaaaaagggtgcaccaaataaccctaaggtttttctaatgcgacagaacaaacacgagctaaagtagatgttttatctcgtatggtagataaacaaaaagagaagatcagggaacttcaacaagcctataatcgtgctaaaactgaagaaggtgaagcaagtcagtcagcgcagcggtacgccgaacaaattcaccgggcaacaggtgaattaaatcgatttgaaaacgaattacgtcagtcgaaccatgaattagaacaacaaggaaatcgtttattaaacttcggtactcgtatggagacgttaggtaatcatttgcaaaatgctggtatgcaaatcggtatggtgtttggcggaatgacttatgcaataggtcggggtttaaaatcagctgtagaagaatccatgaattttgagcaacaaatggccaatgtgaaagctgtgtctggctctactggagaagaaatgaagaaattaagcgaattagctgtcaacatgggagaaacaacaaaatactctagtgttcaagcaggacaaggtatagaggaattaataaaagctggagttagtttaacagatattataaatggtgggttagaaggtgctcttaacttagcgacagcaggagaactagaattaggtgaagcggcagagattgcatccacagccttaaatgcatttaaagcagatcatctttctgttgcggatgcagcaaacattttatctggagcggctaatgcttcagcaacagatgtacgggagttaaaatacggtctttcagcttcatcagcagtagcagcaggagctggaatgacatttaaggatacagctactacgttagcggtttttgcacaaaatggtttaaaaggttctgatgcaggtacttctttaaaaacaatgcttatgcgattaaatccaacaacaaaagaagcatataaccaaatgagggatttagggttaattacttataatgcacaagctggctatgattttcttgttaaaaacggtatacaaccagcttcaaggagcgtcggtgatattgagcaagctttagaaggctatgtaatgaaaatagaaggtgcgaaaaagtggaatgacaagtgtgatacaacattccgtgaattagctacaagttcagcgttcctatcatcaaaattctatgatcaacaaggacatattcaaagcttagaaaatatttcaggaacacttcatgaatcaatgaaagatttaacagaccagcaacgaagtatggctttggaaacgttattcggatcggatgctgtacgtggtgcaacgattcttttcaaagaaggtgcgaatggggtaaacagcatgtgggatgccatgtcaaaagtgacagcagctgaggttgcagccactaagattgatacattaaagggacgtcttacattactagattcagcgttttcgacaatgaaaaagacaattggtgatgcgcttgcccctgtggttagtgtttttgttgctggtgaagtgcaccccaattgttagacacataactaacaattggaggtgcattttttatggctaaattttcttcaaaagataaaatacaagcagtaaaacgatatctagaaggtacggaaggcggaaaaaccattgctaattctataggggttcatcctagagaactttatcaatggattaaacggtttgaattttcaggggaaaaggcgtttgaaaaacgctatacaacttaccctctcgagtataaactagatgtaattcattatatgaatgaaaatgggacatctctgagagaaacagctgctttttttaatattccttcttgcgaaacactccgaaaatggaaagtagcttatgaaacagaaggattagatgccctaaaatcaaagaaaaaggggcgtctaaccatggccaaagaaaaagctaagctccaacatttaaaacaaaacgaagtatttcttgaaggttctatagaagcgctacaagcagagaatgaacgtctgcgtatggaaaatgactatttaaaaaagttgaatgccttagttcaaaagaagaaaacatcacagaccaagacaaagcgcaattgatttatgaattaaggcataaatataaggtcgttgaccttgtgaaagtcgctaatatcgctcgtagtacgtattattactggatgaaacaagcgaaacgtccagataaatataagaaagttaaagaattaattaaagagatttttagtgagaattttgggaggtatggttatcgtcgtattacattggaattacgtaatcgaggccatgcattaaatcataaaaccgttcgacgtttaatgaatatcctgggattaaaatgtcttgttcgattaaaaaaatatcgttcatataaagggactgtcgggaaattcgctcctaatattttaaaacgtaattttcacgcatcaaaaccaaacgagaaatgggtaacagatgtgacggagttccacttacatggtaaaaaactatatctatcacccattttagacttatataacggagaaattatagcttacaatatagaacatagacctgcctattcccttgtttctaaaatgttaaataaggcgtttcaatgtttgaatgataaggaaactcctattttacactcggatcaaggttggcattatcaaatgcgacaatatcatcagtcgcttaaaaaacataacgttatccaaagtatgtcccgtaagggaaattgcttagataatgcagtcatggaaaatttctttggcttattaaagtctgaattactttatcttaaagagtttgaaagtatggaacaatttaagcaagaactagaaacttatattcattactacaatcacaaaagaattaaaacaaaactaaaaggattgtcccctgtgcaatacagagttcaatccttagtagctgcttaatatatttgtctaattttttgggttcagttcatgttcttgtaatcgctcctaagtcaccgactgttcgtaagtctaggtgcataaaaattgtaacagctgttaataatacaatcgctattaacggagctggaatggatttgataaatcgcggtacaatatagacaatagctaatgtaatcgcaacaaatacatatgtcagattggaaataccaataaaatgtggtacttgagccataaaaattaaaattgctaacgcattaacaaaaccaatcatgacagcacgtggaataaatttcattaatcttgctactttaaatatcccaaaaataatttgtataacaccagtcaaaattgtggctgctaataaataattcagcccatgttctttaactaaaggaaccataagcaatgccatcgcacctgttgccgctgaaatcattccaggacgaccacctacaaaggcaataataactgcaatacaaaaagatgcatataatcctaccattggatctacacccgcaataatggaaaatgcaattgcctctggaattaatgctagtgcaactacaatccccgcgaggatatctgctctaacattagaaaaccattctgtttttaatttttctaccactgttttatacacctcatatcatttattttgtggcttttaagtctcataaaagccgcgttcacgatttaataaaaacagtctaacacttatcgtcccaaaaaggaacctttttgatactgatttttcgacgccaagttatggtatgataaaagaaacatcttaactgttaggagagcatgtatgttaatcggatatatgagaccatatcaagatgatctgaaatgcgagggacaactaaaaaacttagaaaaagtaaagtgcacaaaaatcatttcagaggaacattcatcagcaaaaaaaagaacacatcttaaaattatgataagtaacctgaacccaggtgataaaatagtcgttacaaaactttttacattggctgattcaacacgccatctggtggagttaatagaaaaaattgatatgaaaggcgcttactttcaatctcttactgagggaatcgacacaagcaatcaagctggatatcaattcagcttgattttaaatcatcttgttaattttcaaagtgacgtgataagtgaaaaaacaaaaaaaggcttatacgaagcaaaacagaaaggaatcactccaggacgaccaagaaaacctgatgaaaatgtaaaacgtgcgattgttatgtatcaaagtggagattatagtcttgctcaaataaaagatgaaacaggaattagcaaatccacactatacagatatctagaaaattaaacattaattatatttggcattgaacctaattaaacctacaaaaattgtgtaggaatgtagatactcactataaaaaaacaaacgattcttcctcgacagcttgttgaaagaatcgtttgtttttttgaagtgcaccccaattgttagacacagtctaacaattggaggtgcattttttatggctaaattttcttcaaaagaaaaaatccaagcggtgaaacgatatttagatggtacagaaagtggaaaaacaattgctaaatctataggagttaaccctagcgtacttcgtgagtggattagacgatatgagtcttcaggtgaaaaggcctttgaaaagtgctatacattctacccagcccagtataaactagatgtactttattatatgaatgaacacgggacatctatcagagaaacagcggcacttttcaatataccgtcttatgaaacacttcggaaatggaaaatagcttatgaaacaggaggattggatgccctacaatcaaagaaaaaggggcgtccaaccatgaaagataaaaaaataaagccagtagatgaaggatcaatcgaagccttacaagcggaaaatgagcgtttacgtatggaaaatgcatatttaaaaaagttgaatgccttagttcaaaacaaagaaaaatcaccaaacaagacaaagcgcaagtaatctacgagttaaggcatgaatttcctatcaaggagttacttcaactcgcaaacattccacgtagtacgtactattactggatgaaacgttttaatcgtcctgatccaaatgcggaggtaaaagaactgattcaagctatttataatgaacacgatgggtgttatggttatcgtcgtattcgtgatgaacttatgaatcgtggacacaaagtaaatcataaaaaagtgtatcgccttatgaaagaattagggttaaaatgtctggttcgtatgaaaaaataccgctcttacaaagggacagttgggaaaattgcgccaaatattttaaatcgcaacttccaagctgaaaaaccaaatgaaaagtgggttacagatattacggagtttaagttatttggggagaagttatacctatcaccaatgttggatttatttaatggtgaaattatcacgtatacaattggttcaagaccgacctattcccttgtttcaacgatgttggaccaagccctttattgtgtaaccaatccggataaactcctcattcactctgatcaaggttggcactatcaaatgaaacaataccgtcattctcttaagaattgtggcataactcaaagtatgtctcgcaaaggaaactgttatgacaatgccgttattgaaaatttcttcggtatcatgaaatcggaatttctgtatcgaaaagaatttgaaagtataacacatttcaaacaagaattagcaaagtatatagaatactataatcataaaagaattaaggcaaaattaaagggtatgagcccagtacaataccgggctcataccctagaggctgcctaatgaaacgacctgtctaactttcgggggtcacttcataaaatgtaccctatagaatagacacttgaaaaaagtctattctatagggtatttcttgtataataaaaggaaaattgggatcggagaatgttgaaaatgacaaaaaaactatttacagaaagagaaattcaaattctatcaaataacctatacgtaaaatctgtaagtcagaaaggtatcacttatacagaggaatttaagcatatttttattgaggaaaatgaaaaaggaaagctacctcgaaatatttttgaagaatgtggttttgatatagatatgattggaatgaaacgagttatgtcatcgggaagtagatggcgtgctgcttatagaaaaaatggtgtattgggtttaagggatacacgtatcgaaaacgctggaagaactcttgagagagagcttacgttagaagaaaagtatgcccgtttagaagccgaacgaaacttactaaaggcggaaaacgaattgctaaaaaaaatcaaacttatggaagggaggatgagaaggaaataacactaccacctagtcagaaattcatcttgattcgttctgtcatcatgaaatacaacttaaggaatatggtcagtcatttgtgtaaagtagctggtgtatcccgttcgggatactataattacttttcagtttcatctcaagaacaacggaaacaaaagagtgatcgagatgaaatcttgaaggaaaccatattaaaagcacttcgatttagaaatagaaacaaaggggctcgtcagataaagatgacattggcgggtcagtttcaagttgtctacaatttaaagcgtatccgtagaattatgaagaaatacgagattatctgtccggttcgcaaagcgaatccttataaaagaatgcttaaagctacaaaagaacatcgaatagtaccaaatcaattaaatcgggaatttaaacaaaataccccagggaaaacacttcttacagatatcacctatttagtttacggtaagaatcaaagggcctatttatctacaattttagacggctcaactaatgaaattttagcttaccatgtttcagaacagatgacattagagctcgtaacgacaactctccataaactaaaaaggaatccgcggattcgattgactgaaggtgcttatattcattcagatcaaggatcccactacacaagccctacctatcaaaagctagttaaaaagctaaacctaggacaatccatgtcaagaagaggaaactgttgggataacgccccacaagaatcattttttggtcatctgaaagatgaagctcatataaaaccttgcgtgtcctttaatgaattgaaacaagagattaagaaatatatgacgtattataatcattatagatatcaatggaatttaaaaaagatgactcctgttggatacagaaaagtcaattcaataaattgtgctatctcattaccagaagagtgaagccgctagttcaaacggcttagacatagtttgtctaataaagaaaaaattataagtagaaattttgtttgctctatatgaaaagataaatagatattcatcagacaaggataatttagcataccttgaataggatgaaggaacgaattaaagaaaaggatttttgttcaggaagggactgactcaggaatgggactttcggacaggggttggggagcgatggttgcctttggcattgcgactaatatcgttgcttgtatgatggcagtatacattcaaaaatatgagctaatgataaatcatcttacaaatattttatttttaataattatctctttaacgtttattaagatgaaaattaacaaatgggtggctttaggatttacatttgttgtaatagagaaaggtattaaggcgggatatgacttctacacacataattattatggtgtcagttggagtttagctatcattgtctattgcatatacgagatggaaaagtatcatattgaaataaatgaatagccgcaacaataaggtgttagtatgaggaattctttttaaaatactataaaaaagacactttttaaaagaatccttagataaaaaagaaaactctattggttagcttttaaccagtagagttttctttagattagtatcttttagataataattattgatgatgaaaattccactaagaaattcttttaaatataggtattattctaagtatttttcgacaaagtgagagggatatgatgaaatagggggtcaaattttaaagtaggataaattaatttttgaaattggtatacagttctttaataaataaagtttttgcaatatgtctttatctataagatgaagcgtggaatctgtcattatgaaataattgtgatgatagataaatacttttccttccggaaggatcgtgtaattagataaattcggataaataggtggtccatctaaaaattgatctaaatatgaaaatgtaatgcttttttcagcattaaagaatttgacattggatccatcttttatcaaatagcagtgttggaagtaattgggtattattaataagaacccaatcaaaaattctcttggatgcaagagaatttttttattgggaatagtaaggaggaggggaggtgcattacatatgggaaaaggtagaagtaataatgctggtaaaaagcaaccgaattttgatgattcatctaattttgctaaacaaagccaaccgacagaaaagaagaaactgtagaaaaagatgcaactaccattaaacaaaatgtctctttcatacaaaatacgcagacagaacaaggaagacaattacaagaggcgaaagctggatgggaaaatactgcgaaagcactgcaaggtaaagttgaacttaagcaagtagaagattatgttgctgggtttaagatacctgagttgaagcaaatagttgataaaaataaacaagatttgttgggagaactagctaataaacttgcaacggaacaatttaatcagaaaatgactatgatcgacaaccgtttcactatcaatgaagagggtatcaatgccgcagcaaaaaagaaagaagtatacacaatagagcaagcaaatggacaatttgcaaaagattcttatgtaagagatatggaaacccgtcttcagttaactgaaaagggcgttagtctatctgtaaaagagaacgatgtaattgcagcatttaatatgagcaaagaaaacattacgttgaatgcgaacagaattaacttagtaggtttcattacagcaaatcatattaaaggaaaagttttagaaggggtaacgcttaaaacaagtggaaacagatttgttgaaataaataagcaagacatgaagattttcgatttagataagccacgtggctatataggatttatggaaacagatgatggaagtattcaaccttcattagtccttggttctgataatagaaaatacgctggtacaggatcattttatatttatcaagtcatgccgcgaattaatggagttgatcaaccttctaaagcatatgcgaaatttgggatttctaaaggagaaaatgcagaaggaactaatatttggtcaaactatattcaaatgcataatgacggtggacatctgagcgtatattctgatggacaatttcgttttcaaaacttgaataatattatttttgaatctgaaggatgggctccaggatatggttacttctctgtaactacaactgaaccacatatttttacaaataacgcggggcagtttactttcaaaagaaaaggcagtgactataaaatacatttcgtaaacggcgccaccgatcatgatttaattatgggtaatgcaatgataaggtcaagttttgtacaaggttataacaatggcctgcagattaaagatatgatgggtaagggatggaaagatatggaattaagaacattacgagcgcaagaaaatatatctgctacaggacgtatgtgggcgcaagaatttatccctaattcttctcgtacgcttaaaacggacaacctggatttaattcttcaaaagaagcggcaattcgtgctatgacagacatcttgaagaatgaaatgaggttgaatgtatgataaatttacgacctgaaatcgtgcaagctcttgaaaataatcaggagcttgtttttttattgggtggaaaacgtgtttattatcgtaaagctaaaaatgctgaagagtttccgcgtattacgttttttgaactagacaatagaccagatggattttcggataataaagaaagtgaaagtgaaatcacatttcaaatcgatatttggtcaaaaggtagtacaacagcaatccatcaaaaagtgaatggaattatgaaaagtattggtttttcacgctatgcgattgctgatttatatgaagaggatacacaaatttttcattacgcgatgcgattcgcaaaaggagtggagttatagatggctggagaagtaattaaaattagttcaaccgtcggtgtagatagccttgtttacgcaaagttattaaaagatgatgcaacaggtgttgactatagtgcagtgaaagaaatggaaggcgctgtaaaaattaaaacttctaaaaaggtagcttcggagattatgtggagcgataataagaaatcagaaattgcagagtctgacggtgaaattgaggttgaaatcgaacttcgtagtatttcgctttcaactaaagcagacattgaaggatatccagaagtgaaagatggcgtattagacgaaaaacgtgagggtgaaaagccctatctagcaattggataccgttttttaaaggcaaataataagtatcgttatgtttggctacttaaaggaaagctttcacaagaggaagaagaaggcgaaacgaagaaggataagcctaacttccaaacaacgaaactcaaaggttcatttattgagcgtgattttgacgataggcctaaatttacagctgatgctgatgaacctacatttacaaaagctgtgggagataattggtttaaaaaggtgtatgagaagcctgtagtacaatcaccagcaggaaagtaagggggagcaaaagctctctcttttttattaacgaggaggaaaagccatgaaattaacactattaatcaaggaagaaaagaaaatttttcatttaccggagtttattccagcacgtttaattcgtcaagcacctgaacttgctgatattccaaataatccaggtcctgaggatatggataaaatggttcaatatgtagtaaaagtttacggggaacaatttacattagatcaatattgaattcttcgttaggatctacaatttctcgataatctccaaatacatattgatcttgtgtaggatcagtaaaagattcgtctccagctattgctcttgcttctaaataaagttttggtgtaaaacctgtatctttaattcggattgtgtcaccctcattaatcaattcatgcgctaatccaaatacacgtcctatggatgccgcttttacctcataagaaacagacgcatttacacgcttcgtcatttctaattccattaaagttttcaaacgttcaggagacatattttcattgtcagtttccggactataaaaaccgaatttatgtttacctttttcattccatcgttgaaaagcatcagtattagtgatataaggaagaccattattaattttttctatcgtaataatgttatcgccttcacctttcacaaaaccaattaaagctgtacagatattttgcgagttctcaattcgcttaattccaattaaatctttccctaattcaattgttttccctgtatcctgcccgcgttttttcatcatatcaacataccgttcgatatgattccctacaacttcagttcgatattgaatttctagttcaaatagagaagcaatctttttcaaaaaacttaatggatcaataaattcatcaacggtcatagaacggaaacctttataagaaatatttccttttttccatttcgttcccttaagagctatatctacatactctgctactgtttttgcttcaaacttttgcggatcaatataatttgctttaccaagtaaaatccattcaccagacgcgtaagttgtaagggatctattattagaatctttttctgtttcagtaattgtgtatggaacaattcgcccaccccttacttcttttaagaccaaattttgttgcgtaagcgctgcggcttcttttgtaccatcaaaaaccgtaaaatctagcttatcaacattatttttaatctcccaatgcctattgtcattccaataatcctttgattgaatcgctccgataatttgatctgtttgtgaatcaacaacatgtaatattccacttggtgttctcatctaaatcgctccctatatgtaacctttgctgttcctatatcggaaggtatgatttcaagtttattcgtccctttattgataacaggaaaattactaaaaatatcttttatgttaatagcgtttttcccttcaatactgacatgactgctttctgtatcaatcacaactttgtcaccaacatcgactatataaggctagattcagcgttttcgacaatgaaaaagacaattggtgatgcgcttgcccctgtggttagtgtttttgttgctggattgcagaagcttgtagatggatttaactcattaccagggccagtacaaaaggccattgcaattacaggtggtattgttcttgcgctaacagcggttgctactgttatcggagtaataatgggggcaatcggtatggttgtttctggcattggttctttagcaatagcaatgggtgtagctacagcggctactagtgtaacgggcgcagttttaggaatattaaccgcagctttaggaccagtagcaattgctttaggtgtggtagcggccgctgttggtgttggggtattagcatataaagggtatcaaaaagcaactgaagacagtattgcttctgtagatcgctttgctacaaatacagaagggaaagtaagttcttctacaaagaaagttcttggtgagtatttcaagctgtctgatggcattagacaaaagttgactgaaattagattgaaccatgaagtaataacagaagaacagtcgcagaagttaattggccaatatgacaagttaggtaacacgattatagaaaaaacaaacgcaagacaacaaaaagaagttgagggacttaaaaagttctttgcggattcttatgtgttaaccgcggaagaagaaaataagcggattgaacaaatgaatcaacattacgaacaagaaaagttaaaaacacaagaaaaagaaaataaaatcaaagaaatcattcaaacagcagcaaatgaaaagcgtgaatttactacatctgaaaggatttctttacaagctttacaagacgaaatggataggacagctatccaacatatgtctaaaaatcaaatggaacaaaaggttatttatgagaatatgcgagtacaagctagtgaaattacagctagacaagcagcagaagttgttgaaaatagtgccaaagcaagagataaggttattgaagatgcgaaaaagactcgagatgataaaatcgcatatgcgatacgtctacgagatgagtcaggaacacttaataaagaagaagcggatgcagctatcgcagaagcaaatcgtcaatataatagcacggtttctacagcaagagataagcataaggaaattgtaagtgaagcaaaagcgcaagcaggagaacatgcaaatcaagttgattgggaaactggtcagataaaatccaaataccaagtaatgaaagatgatgtcgttcaaaagatagtaaaaaaagagtccatctgatatgatggactcaatactgttttatctggaggggatttttttatggcaagaaaaggacaatcatttcaaaaatatacagaagaactaaagcgagaagcagttcgtcttcgattagaagagagaaaatcattgcgagaaattcgtgaacaactcggtgtgaagagcgatgcccagattattgagtgggtaaaacgtgcgcaacaaggggagtcctttgatgatcaacgtggtgtctggaatcgaaagaattttaatagtctagaagaagaaaatgcttatttgaaggcacaggttgagtatttaaaaaagcgcaatccaaatctacacgggaaggaatggtcctaaagaaagaacgattttctcttatcgattcattacgccaagcctatccactccgatggttgcttcaaatcgcggaagtttctaaggctggctactataaatggcggaaatatcataacgtgcagcgtttacgtcagaaaagggatatgtggcataaagaacatattttatctattcatcgtcagcacccttactatgggtataaacgtatgactcgtgctttggctcgagaaggaatggtaatgaatcataaacgtgttcgtcgtcttatgagagagctgggtattcaatctatcattcgaaaaaaacgtccgttttatggaagaaaaacatctgtggtatttaaaaatcatttgaatcgagagtttcaagctgaaaagcaaaatcaaaaattcgtaacagatattacttatgtacgaatcggagaacaatttgcctatttgtcggctgtgttagatttatacaacaatgaaattgttgcctggaagctatcttcaagaaatgatttagatttggttttaactacattacgtcaattagaagggaagtcattaactactaagccccttttccattcagatcaagggtttcaatatacatctaaatcctacgcaaaacagttagagaaattaggatttgtcggtagtcattctagacgtggaaactgttttgataatgcgtgtatcgaatcattcttctcacatttaaaaacagagaagttgtatttagtgtgcccaaaaacatatgaaatggcctaccgagcaattcaagaatatattcaattttataatacagaaagattccaagaaaaacttcacggcctttccccgatagaatatcgggaaaaggccgtggcataatactctttttattgaggacagtaggcgctttggtgatggtgtaagtgaaggtacgaaaaaagctcttgaagggtatgtgaatttaaaagagcaggcttttaaaacattagatgaaataccaacaatgacaggtgaaaaggctaaagaggctgtacaacgagcacatgacgaatttggtaagttagcagatgaagcgattcaagcaataaataaagataaagggaaattccaagcgcatttagaaagttggtttgccggagaatctgattcagcagtcctacgtgcaaaggacaaaattttgaatgatcaaatggaagtgtataaagcacaagaggaagccgttattaaagcgaatgaaaaaatacaaagtcttttaacgcaatataatgggcaaatctataagatgacagaatcagataaaaaggtgtttttaaccgctttacaatcaattgacgccgaggtagggaagtcagcagctaagagtgtaaatgagatacaaaagattggtaaggcgatggataatttcaataagaacacttctgttgatacaatccaaggtaaagtaaaggagttaggttcagagtatacgaaacttacaaatgacttagataaagcaagaaaaaaagaaatagaattcgcaaagagtcatattacagattctgaaaaccaaaaggcaacaattgctcaaatcaataaaaaatactctgaacagtccgtccttataacagaagggtatagacaacagcttcaacaagctcaagaagtgttaaaatccaaaggcgttgagatggatttaacaacgggtatcacgaaggctgaaaatgagaaaattaaaattcaaggtcgaggattcggagagtatgttaagaattccgaaataattgaaagtacaaatgagaatctattcaagagacttcaagatagatcttcaaaagaagctgatctgagaaagaaaagtgctgatgaagtaaaaacatatggagagtcattaatttcaaattctaatattgtttatgataaccttttccagtcaactcgtgaaaaatctattgaagttgcaaatgacattgcaaagacatttgaagatggaagtaaaacaattgatttaggagagcaaggttgggttgcagtagaagagttcgttgatggaattaaatctggtaagtacaaggtccaagatgtagcgattgcaatcataaacactatgcggtcagaaatgggtaataaaccattgacaccagaaggtatgaggacagtaggcgctttggtgatggtgtaagtgaaggtacgaaaaaagctcttgaagggtatgtgaatttaaaagaacaggcttttaaaacattagatgaaataccaacaatgacaggtgataaggctaaagaggctgtacaacgagcacatgacgaatttggtaagttagcagacgaggcaatccaagcgattaataaagatagaggcaagttacaagctcatttagatagttggtttgctggagaaactgattccgcagtattaagggcaaaagataaaattgttaacgatcaaatggaagtatttaaggcacaagaagaagcagttattaaggcaaatgagaaaattcagagcttacttacacaatataatggacaaatatataagatgactgcggccgataagtcggtatttcttacagctttaaaagctattgatgcagaggttggaaaagcagcttcaaaaagtgtggatgagattcaaaaaataggtaaagcaatggataatttcaacaaaaatacttctgttgagacaattcaaggtaaagtaaaagagctaggttcagagtatacgaaattaacaaatgaattagataaagcaagacaaaaagaaatagagtttgcgaaaagcaaaatagctgatactaaagggcaagaaattgcgatagctcaaattaacaaaaaatactctgagcaatctgtattgataacaaaagggtatgagcaacaacttcaacaagcgcaaaaagtgttagaatccaaaggtgttgagatggatttaacaacaggtattacgaaggctgaaactgaaaaaattaaaattcagggtcgaggattcggagagtacgttaagaattccgaaataattgaaagcacaaatgagaatctattcaagcgacttcaagatagagcttcaaaagaagctgatctgagaaagaaaagtgctgatgaagtaaaaacatatggagagtcattaattgcaaattctaatattgtttatgataatcttttccagtcaactcgtgaaaaatctattgaagttgcaaatgacatcgcaaaaacatttgaagatggaagtaaaacgattgatttaggagagcaaggttgggttgcagtagaagaatttgttgatggaattaaatctggtaagtacaaagtccaagatgtagcgattgcaatcataaacactatgcggtcagaaatgggtaataaaccattgacaccagaaggtatccagcaacaaaaacactaaccacaggggcaagcgcatcaccaattgtctttttcattgtcgaaaacgctgaatctagtaatgtaagacgtccctttaatgtatcaatcttagtggctgcaacctcagctgctgtcacttttgacatggcatcccacatgctatttaccccattcgcaccttctttaaaaagaatagttgcaccacgtacagcatccgatccaaataacgtttctaaagccatactacgttgctggtctgttaaatctttcatcgattcatgaagggttcctgaaatattttctaaactttgaatatgcccctgttgatcatagaatttcgatgataggaaagcggagcttgttgctaattcacgaaatgttgtttcacattttttattccatttcttcgctccttctgtcttcattacatatccttcaagagctgtttcaatgtctcccacacttctagacgctggtgtaactccatttttaaccaagaaatcaaatcctgcttgcgcattataagtgatgagccccagatctttcatttggttatatgcttctttagtagtggggttcaacctcatcagcatcgtttttaaagatgtacctgcatctgaaccttttaaaccattctgcgcaaatacagctagagttgtagctgtatctttaaacgtcatccctgctcctgctgctactgccgatgatgccgctaaaccatatttcagctcacgtacatctgttgctgaagcattagcggctccagataaaatgtttgctgcatccgcaacagaaagatgatctgctttaaatgcatttaaggctgtggatgcaatctctgccgcttcacctaattctagttcgccagctgttgctaaattaagagctccctctaatccgccattaataatatctgttaaactaactccagcttttattaattcctctataccttgtcctgcttgaacactagagtattttgttgtttctcccatgttgacagctaattcgcttaatttcttcatttcttctccagtagagccagatacagctttcacattggccatttgttgctcaaaattcatggattcttctacagctgattttaaaccccgacctattgcataagtcattccgccaaacaccataccgatttgcattcctgcattttgcaaatgattacctaatgtctccatacgattaccaaaattcaataaacgattaccttgctgacaagctctttcttcatggcaggtagtttggcagagcatgtaccataggtcaagccttttcctgtctctttgtatgcgcgatcccataaggataggaaatgattgaatacaaagcgagaacacccaatcgttttgttgattagaattgcttgtgcttgatttggatagatacgaaacttataggctttattaatcattatttaattcacctccattttggtatatgactattacacaccgaacgtacattcgatagatagtggagcaacactttctgtatgtcgaacaattaagatggcttccttccatcccttgttcgacgccaattcatctcccacctactcactgggctgtgacccttcacgctccttgaggaaggagtcttcttggctaaaatgataaattgatgaaaacaaaatctttgtagacaatagtgttgtgatttttaacgtatcccacgaaagaatactccttcctcaagcgtagcccaacgataggtaggagatgaatttcagtttgacggagcaaaagggctttgcttttgatatttcccctgataaaatcagtcttataaataataaggactggtatattaatgaaattagataatattaattattcagtgttcttgttgtattatcgtcttgtattggttgtaaaatacagaagaaatgtattcaatgatgatatatcagattatgcaaaagacatgtttgtcaggttatccgagaattacaacataacattggtagagtggaatcataatgttgaccatgctcatattttgttcaaggcacatccgaatacagaaatgacaaaatttattaatgcttataaaagtgcaagttctcgactaatcaagagagactttccgcaagtgaaaacaaaactttggaaagaaatgttttggtcaagaagtttttgcttattcactactggtggttcgccaatagacgtagtaaagaaatatattgaaaatgggtgtttttgcccatcccctcgaaaagggggaataagaaaaaataggatgtttttgtagatggagcgccagagttactgtcgtggactgaaaaatatcattcaatacaattgtgcagtacatttttttaaaaatttgtagtaaatattttggtaacagtgatctgtgtgtaaatgtcaagataaacatgtacattttcgcttgtttaagcatgtacaaaatcaatcattttctttgctaaaatgtgtaaatgtcaagataaacatgtacattttcgcttgtttaagcatgtacaaaatcaatcattttctttgctaaaatgatctttaattcgataggattgtcctacaatactgaccaccgtggcatgatgtaagacacgatctagtatggcattggcgagtttagggtcctggaatacttcgtcccaagacttgaagttgatattggtcgttaggatggtactacgcttttcataacgcatatcgattaattgaaagaataattttgcatcctccggatcaataggcaagtacccaatttcatcaataataagtaatttgtattttgtatagtgctttaaacgagattctaggcgattctcaatcttggcacgttttaaattttgaagtaaatcatgacatttaataaaataagtacttgttcgctttttagctgctgctataccaatagacgtggccaaatgggtcttaccaacaccactaggtcctaaaaatactatgttttcttgttgctctaagaaacgtagagaaataaaatctaagatttgttgtttattaatactcggctggaattcgaaatcaaactcatcaacctcctttctatgaggaaatgcgcccattttcaccatagaatgaatcatattttgttctcgtacatcaatctcatagtttgtcagtttaacaagtgtctctacgaaggataattcattattaatgctaaaatcgactacgtcacctaaatgttgtgccatttgttttaattttaaatactctaggtttgttgttaattgttgatagctattcttcatttctatatacctcaccaattactgataaattttgtttcgccaaattgtcaatgttcggatatttaggtagtgacttagccaatgcttttttataatgttcttctttataattgagcttagattggctgattttatgttgtacaattaacttcatgttatgataaacatatatttgattatcatatacttgtaaaccgacggttttaccttgatattcagctggaactgagtattgattcgatttgtaagatatcatgcctgatgtattaacttttacaagtttatgcttaatcatataggaatctcttatcgcgctcttcgggagtggttgtaggagattcttttcctgttttagggcaaacactcaagaacttccgaaaacaagttcttacattggaatagatgtaggactaaaagatttcgctattttgtcagatggaacacactatgaaaatccgaagtttttccgatcattagaagataagttggcgaaagcacagcgtgtgctttctagaagaatgaaaggatcttctcgctggaataaacaacgagtaaaggtagctagaattcatgaatacatatccaatgctagaaaagattacttggacaaaatttcaactgaaatcatcaaaaaccacgatgttatcggtatagaggatttgcaagtatcgaatatgttaaagaatcataagttagcaaaagcaattagtgaggtatcttggtcgcaatttcgatccatgttagaatacaaagcaaaatggtatggcaaacaagtcattgtcgtatcgaaaacatttgcttccagccaattatgttcttgttgtgggtatcaaaataaagacgttaaaaatctaaacctacgtaaatgggactgtccttcttgtcgtacacatcatgatagagatattaacgcaagtatcaatctaaagaatgaagcgataaggcttctaaccgcaaggactgcggggttagcctaatcaattagagttcgatagaactctttacttaggaatccctcacttctaaacgaagtgaaagtgggggtagttcaattcattctttttttccttataattcgatcttgtaatcgctgttgttcttttatcagtcattcctacataagcgttggatatattgcaggtttgtccagactgaaaagagcttattaaaccatccattattcgcattcttcttcatatatttgtaccacaattatttttttgttgttaaaactagtttttaagaagcatatgctttagcaactgcagaaattctgtatcacttttatcatcttttatataatcctgttcgtagttaaaaatcattcgtactaacataaaagctgtaagcggtaatgggaccttatgcaaagctccttgctgataacctttttcgagcaaattacttatcatgttaattgcttcttcttcagattggggtgtttttgcccatcccctcgaaaagggggaataagaaaaaataggatgtttttgtagatggagcgccagagttactgtcgtggactgaaaaatatcattcaatacaattgtgcagtacatttttttaaaaatttgtagtaaatattttggtaacagtgatctgtgtgacaatagaaccgaatcatgaaataaagcgttagcggagattaacgagcaataataagaggcgtttactatcttttcaaataaatgtttttgtacttatggtatactatatgtactttcgtttttacgaaatccctagaaagtatgtagaaaaggttctgacttttttgttagaaccttttcttattttttcgtaacaaatgcttcttttaaatttctgatccaaacagctttatgtaaatcggtatgagaaatccaattccctgattcatgagaaccgacaaattccttataaatgggatgccaaataataagatatgtttcattttcatattgtatctcatcaaattgccgcagcgattttcctaatatatcggattggccgataggtatggcccctttttctaaaatttctttaaactgtttcaaaggcatcacactccttagcataggtatatgtatatattttttaaagatgtattttttcctcttttattatagtaaatgaagagtggatattttaaaaatacatgtagaaaatgccctctatacataaggggtgaatgtcagctttgttatattactatgtatataatgaaagatttattgataggttgataggttattagataagtaaattagttataattaatatatagttttaattatataaaaaaccataataaagaaaggagttcaatcttcattagagtgaactccttcctttactatattttatattaagacatagaagaacctttaaatctttgttaggggtaaagatttaaagaaaagtttagcttaatgtcattttacatcattgcgtttctaataaaattgataattaatattctcattattaagattatttaggtgtataatacaaaag
